(19) United States
(12) Patent Application Publication
(10) Pub. No.: US 2024/0252661 A1
(43) Pub. Date: Aug. 1, 2024

(54) PROTEIN-DRUG CONJUGATES COMPRISING CAMPTOTHECIN ANALOGS AND METHODS OF USE THEREOF

(71) Applicant: Regeneron Pharmaceuticals, Inc., Tarrytown, NY (US)

(72) Inventor: Amy HAN, Hockessin, DE (US)

(73) Assignee: Regeneron Pharmaceuticals, Inc., Tarrytown, NY (US)

(21) Appl. No.: 18/516,454

(22) Filed: Nov. 21, 2023

Related U.S. Application Data
(63) Continuation of application No. 17/373,524, filed on Jul. 12, 2021.
(60) Provisional application No. 63/051,172, filed on Jul. 13, 2020.
(60) Provisional application No. 63/154,531, filed on Feb. 26, 2021.

(51) Int. Cl. A61K 47/64; A61K 47/55; A61K 47/66

(52) U.S. Cl. CPC A61K 47/64; A61K 47/55; A61K 47/67

(57) ABSTRACT

Described herein are protein-drug conjugates and compositions thereof that are useful, for example, for target-specific delivery of therapeutic moieties, e.g., camptothecin analogs and/or derivatives. In certain embodiments, provided are specific and efficient methods for producing protein-drug constructs (e.g., antibody-drug conjugates) utilizing a combination of transglutaminase and 1,3-cycloaddition techniques. Camptothecin analogs, antibody-drug conjugates, and compositions which comprise glutaminyl-modified antibodies and camptothecin analog payloads and are provided.

### CROSS-REFERENCE TO RELATED APPLICATIONS

[0001] This application is a Continuation application of U.S. application Ser. No. 17/373,524 filed Jul. 12, 2021, which claims priority to U.S. Provisional Application Ser. No. 63/051,172, filed on Jul. 13, 2020, and 63/154,531, filed on Feb. 26, 2021, the contents of which are incorporated herein by reference in their entirety.

### FIELD OF THE DISCLOSURE

[0002] The present disclosure relates to protein-drug conjugates (e.g., antibody-drug conjugates), pharmaceutical compositions, and methods of treating disease therewith. Also provided are specific and efficient methods for producing protein-drug constructs utilizing a combination of transglutaminase and 1,3-cycloaddition techniques. More specifically, the present disclosure relates to protein-drug conjugates (e.g., antibody-drug conjugates) comprising camptothecin analogs and derivatives.

### SEQUENCE LISTING

[0003] An official copy of the sequence listing is submitted concurrently with the specification electronically as an XML formatted sequence listing with a file name of 250298_000599_SL.xml, and a size of 2,595,435 bytes, and created on Jan. 5, 2024. The sequence listing contained in this electronic copy of the XML formatted document is part of the specification and is herein incorporated by reference in its entirety.

### BACKGROUND OF THE DISCLOSURE

[0004] Proliferative diseases are characterized by uncontrolled growth and spread of abnormal cells. If the spread is not controlled, it can result in death. Abnormal proliferation, for example, cancer, is caused by both external factors (e.g., tobacco, chemicals, radiation and infectious organisms) and internal factors (inherited mutations, immune system conditions, the mutations that occur from metabolism). These causal factors may act together or in sequence to initiate or promote abnormal proliferation. Cancer is treated by surgery, radiation, chemotherapy, hormones and immunotherapy. However, there is a need for more effective anti-proliferation drugs.

[0005] The ideal anti-proliferation therapy would enable targeted delivery of highly cytotoxic agents to tumor cells and would leave normal cells unaffected. Conventional chemotherapeutic treatment is limited because of the toxic side-effects that arise from effects of the drug on non-cancerous cells. Various approaches to targeted drug delivery have been tried, including the use of conjugates of tumor targeted probes (such as antibodies or growth factors) with toxins such as Pseudomonas or diphtheria toxins, which arrest the synthesis of proteins and cells. However, the side effects include reaction of the immune system due to non-human components of the conjugates. Further, the half-life of the drug conjugates was limited due to elimination from the circulation through renal filtration, and schematic degradation, uptake by the reticuloendothelial system (RES), and accumulation in non-targeted organs and tissues.

[0006] Another approach uses passive drug carriers such as polymers, liposomes, and polymeric micelles to take advantage of the hyper-permeability of vascular endothelia of tumor tissue. Polymeric drugs and macromolecules accumulate within solid tumors due to an enhanced permeability and retention mechanism. However, barriers of using such targeted deliveries include fast clearance of foreign particles from the blood, and technological hindrances in obtaining highly standardized, pharmaceutically acceptable drug delivery systems with the necessary specificity and selectivity for binding tumor cells.

[0007] Protein conjugates, such as antibody conjugates, utilize the selective binding of a binding agent to deliver a payload to targets within tissues of subjects. The payload can be a therapeutic moiety that is capable of taking action at the target.

[0008] Several techniques for conjugating linkers and payloads to antibodies are available. Many conjugates are prepared by non-selective covalent linkage to cysteine or lysine residues in the antibody. This non-selective technique can result in a heterogeneous mixture of products with conjugations at different sites and with different numbers of conjugations per antibody. Thus, there is a need in the art for methods and techniques that provide site-selective antibody conjugation.

[0009] There is a need in the art for additional safe and effective anti-tumor targeting agents that can bind to various antigens to provide enhanced the treatment of diseases such as cancer for use in monotherapy and combination therapies. In certain embodiments, the present disclosure meets the needs and provides other advantages.

[0010] The foregoing discussion is presented solely to provide a better understanding of the nature of the problems confronting the art and should not be construed in any way as an admission as to prior art nor should the citation of any reference herein be construed as an admission that such reference constitutes “prior art” to the instant application.

### SUMMARY OF THE DISCLOSURE

[0011] Various non-limiting aspects and embodiments of the disclosure are described below.

[0012] In one aspect, the present disclosure provides a compound having a structure according to Formula (A):

[chemical structure]

wherein:
[0013] BA is an antibody or an antigen-binding fragment thereof;
[0014] Gln is a glutamine residue;
[0015] L1 is absent or a first linker;
[0016] B is a branching unit comprising at least one adduct of group B′ and group B″, wherein one of the groups B′ and B″ is selected from —N₃ and

[chemical structure]

and the other of the groups B′ and B″ is selected from

[chemical structure]

where Q is C or N;
[0017] L2 is a second linker covalently attached to the branching unit B via the at least one group B″;
[0018] M is absent or a moiety having the structure

[chemical structure]

where R, R′, and R″ are independently at each occurrence hydrogen or a C₁-C₄ alkyl, or wherein R′ and R″ together form a 5-membered or a 6-membered ring;
[0019] Dxd is an anti-tumor agent having a structure according to Formula (P):

[chemical structure]

[0020] k is an integer from 1 to 12;
[0021] m is an integer from 1 to 30, and
[0022] n is an integer from 1 to 30

[0023] In another aspect, the present disclosure provides a compound having a structure according to Formula (I):

[chemical structure]

wherein:
[0024] BA is an antibody or an antigen-binding fragment thereof;
[0025] Gln is a glutamine residue;
[0026] L1 is absent or a first linker;
[0027] B is a branching unit comprising at least one adduct of group B′, where the group B′ is selected from —N₃,

[chemical structure]

where Q is C or N;
[0028] L2 is a second linker covalently attached to the branching unit B via at least one group B″, wherein the group B′ and the group B″ form the at least one adduct;
[0029] M is absent or a moiety having the structure

[chemical structure]

[0030] where R, R′, and R″ are independently at each occurrence hydrogen or a C₁-C₄ alkyl, or wherein R′ and R″ together form a 5-membered or a 6-membered ring; Dxd is an anti-tumor agent having a structure according to Formula (P):

[chemical structure]

[0031] k is an integer from 1 to 12, and
[0032] n is an integer from 1 to 30.

[0033] In one embodiment, the BA is an antibody or an antigen-binding fragment thereof.

[0034] In one embodiment, the BA is an anti-HER2 antibody, an anti-HER2/HER2 bispecific antibody, an anti-STEAP2 antibody, an anti-MET antibody, an anti-MET/MET bispecific antibody, an anti-EGFRVIII antibody, an anti-MUC16 antibody, an anti-PRLR antibody, an anti-PSMA antibody, an anti-FGFR2 antibody, an anti-FOLR1 antibody, or an antigen-binding fragment thereof.

[0035] In one embodiment, the BA is an anti-STEAP2 antibody comprising an HCVR/LCVR amino acid sequence pair as set forth in Table 1.

[0036] In one embodiment, the BA is an anti-HER2/HER2 bispecific antibody. In one embodiment, the BA binds two separate epitopes of HER2 protein.

[0037] In one embodiment, the anti-HER2/HER2 bispecific antibody comprises:
[0038] a first antigen-binding domain (D1); and
[0039] a second antigen-binding domain (D2);
[0040] wherein D1 specifically binds a first epitope of human HER2; and
[0041] wherein D2 specifically binds a second epitope of human HER2.

[0042] In one embodiment, the D1 and D2 do not compete with one another for binding to human HER2.

[0043] In one embodiment, the BA is an anti-MET/MET bispecific antibody. In one embodiment, the BA binds two separate epitopes of MET protein.

[0044] In one embodiment, the anti-MET/MET bispecific antibody comprises:
[0045] a first antigen-binding domain (D1); and
[0046] a second antigen-binding domain (D2);
[0047] wherein D1 specifically binds a first epitope of human MET; and
[0048] wherein D2 specifically binds a second epitope of human MET.

[0049] In one embodiment, the D1 and D2 do not compete with one another for binding to human MET.

[0050] In one embodiment, the BA is an anti-MET/MET bispecific antibody comprising an HCVR/LCVR amino acid sequence pair as set forth in Table 3.

[0051] In one embodiment, the BA is an anti-MET/MET bispecific antibody comprising a D1 antigen-binding domain and a D2 antigen-binding domain, wherein the D1 antigen binding domain comprises an HCVR/LCVR amino acid sequence pair of SEQ ID NOs: 2012/2092, or a set of heavy and light chain CDRs (HCDR1-HCDR2-HCDR3-LCDR1-LCDR2-LCDR3) comprising SEQ ID NOs: 2014-2016-2018-2094-2096-2098, and wherein the D2 antigen-binding domain comprises an HCVR/LCVR amino acid sequence pair of SEQ ID NOs: 2036/2092, or a set of heavy and light chain CDRs (HCDR1-HCDR2-HCDR3-LCDR1-LCDR2-LCDR3) comprising SEQ ID NOs: 2038-2040-2042-2094-2096-2098.

[0052] In one embodiment, the BA is an anti-MET/MET bispecific antibody H4H14639D, which comprises a D1 derived from H4H13306P2 and a D2 derived from H4H13312P2.

[0053] In one embodiment, the anti-STEAP2 comprises an HCVR/LCVR amino acid sequence pair selected from the group consisting of SEQ ID NOs:2/10; 18/26; 34/42; 50/58; 66/58; 74/58; 82/58; 90/58; 98/58; 106/114; 122/130; 138/146; 154/162; 170/178; 186/194; 202/210; 218/226; 234/242; 250/258; 266/274; 282/290; 298/306; 314/322; 330/338; 346/354; 362/370; and 378/386.

[0054] In one embodiment, the glutamine residue Gln is naturally present in a CH2 or CH3 domain of the BA.

[0055] In one embodiment, the glutamine residue Gln is introduced to the BA by modifying one or more amino acids.

[0056] In one embodiment, the Gln is Q295 or N297Q.

[0057] In one embodiment, the BA targets a cancer selected from the group consisting of breast cancer, ovarian cancer, prostate cancer, lung cancer, liver cancer, or brain cancer.

[0058] In one embodiment, L1 comprises C₁₋₆ alkyl, phenyl, —NH—, —C(O)—, —(CH₂)ᵤ—NH—C(O)—, —(CH₂)ᵥ—C(O)—NH—, —(CH₂—CH₂—O)ᵥ—, —(CH₂)ᵤ—(O—CH₂—CH₂)ᵥ—C(O)—NH—, a peptide unit comprising from 2 to 4 amino acids, or combinations thereof, each of which may be optionally substituted with one or more of —S—, —S(O₂)—, —C(O)—, —C(O₂)—; and CO₂H, wherein subscripts u and v are independently an integer from 1 to 8.

[0059] In one embodiment, L1 is selected from the group consisting of:

[chemical structure]

wherein R_{A} is a group comprising an alkyne, an azide, a tetrazine, a trans-cyclooctene, a maleimide, an amine, a ketone, an aldehyde, a carboxylic acid, an ester, a thiol, a sulfonic acid, a tosylate, a halide, a silane, a cyano group, a carbohydrate group, a biotin group, a lipid residue and wherein subscripts x, n, p and q are independently an integer from 0 to 12, and combinations thereof.

[0060] In one embodiment, B comprises one adduct of group B′.

[0061] In one embodiment, —NH-L1-B′ is selected from the group consisting of:

[chemical structure]

[0062] where the

[chemical structure]

is the amino point of attachment to the glutamine residue of the BA.

[0063] In one embodiment, the group B′ is an azide (—N₃), and the adduct of the group B′ comprises a triazole.

[0064] In one embodiment, B comprises two adducts of group B′.

[0065] In one embodiment, B comprises three adducts of group B′.

[0066] In one embodiment, B comprises at least four adducts of group B′.

[0067] In one embodiment, B comprises a group selected from the group consisting of:

[chemical structure]

[chemical structure]

where (B′) comprises points of attachment of the adduct of the group B′.

[0068] In one embodiment, B is selected from the group consisting of:

[chemical structure]

[chemical structure]

[0069] In one embodiment, —NH-L1-B is selected from the group consisting of:

[chemical structure]

[chemical structure]

[0070] where the

[chemical structure]

is the amino point of attachment to the glutamine residue of the BA.

[0071] In one embodiment, the group B′ is an azide (—N₃), and the adduct of the group B′ comprises a triazole.

[0072] In one embodiment, the adduct of the group B′ and the group B″ has a structure selected from the group consisting of:

[chemical structure]

wherein Q is C or N.

[0073] In one embodiment, M is absent.

[0074] In one embodiment, M is

[chemical structure]

where R, R′, and R″ are hydrogens at each occurrence, i.e., M is

[chemical structure]

[0075] In one embodiment, M is

[chemical structure]

where R is hydrogen and R′ and R″ together form a 5-membered ring, i.e. M is

[chemical structure]

[0076] In one embodiment, n is 2. In one embodiment, n is 4. In one embodiment, n is 8. In one embodiment, n is 12. In one embodiment, n is 16. In one embodiment, n is 24.

[0077] In one embodiment, L2 has a structure according to Formula (L2):

[chemical structure]

wherein:
[0078] B″ is a group capable of covalently attaching to the group B′;
[0079] SP1 is absent or a first spacer unit;
[0080] B2 is absent or a branching unit;
[0081] SP2 is absent or a second spacer unit;
[0082] AA is absent or a peptide unit comprising from 2 to 4 amino acids;
[0083] SP3 is absent or a third spacer unit covalently attached to the Dxd, and
[0084] p is an integer from 1 to 12.

[0085] In one embodiment, the at least one group B″ is selected from the group consisting of —N₃,

[chemical structure]

and combinations thereof.

[0086] In one embodiment, SP1 is absent or selected from the group consisting of

[chemical structure]

[0087] In one embodiment, the B2 is absent or selected from the group consisting of

[chemical structure]

[0088] In one embodiment, SP2 is absent or selected from the group consisting of a C₁₋₆ alkyl, —(CH₂—CH₂—O)ᵥ—, —NH—, —C(O)—, —NH—C(O)—, —NH—(CH₂)ᵤ—, —NH—(CH₂)ᵥ—C(O)—, —NH—(CH₂—CH₂—O)ᵥ—, —NH—(CH₂—CH₂—O)ᵥ—C(O)—, —NH—(CH₂—CH₂—O)ᵥ—(CH₂)ᵤ—, —NH—(CH₂—CH₂—O)ᵥ—(CH₂)ᵥ—C(O)—, —(CH₂)ᵤ—NH—C(O)—, —NH—(CH₂)ᵤ—NH—C(O)—, —NH—(CH₂)ᵥ—C(O)—NH—, or combinations thereof; wherein subscripts u and v are independently an integer from 1 to 8.

[0089] In one embodiment, AA is a peptide unit comprising from 2 to 4 amino acids selected from glycine, valine, phenylalanine, proline, glutamic acid, lysine, phenylalanine, and citrulline, and combinations thereof.

[0090] In one embodiment, AA is valine-citrulline, valine-alanine, or phenylalanine-lysine.

[0091] In one embodiment, AA is selected from the group consisting of glycine-glycine-glycine (GGG), glycine-glycine-glycine-glycine (GGGG (SEQ ID NO: 2113)), glycine-glycine-phenylalanine (GGF), glycine-glycine-phenylalanine-glycine (GGFG (SEQ ID NO: 2114)), L-glutamic acid-valine-citrulline (^{L}EVC), and D-glutamic acid-valine-citrulline (^{D}EVC).

[0092] In one embodiment, SP3 is absent or selected from the group consisting of

[chemical structure]

and combinations thereof, wherein R_{c} is independently at each occurrence absent or a group selected from

[chemical structure]

[0093] In one embodiment, the M-Dxd has a structure selected from the group consisting

[chemical structure]

[0094] wherein R is a hydrogen or a C₁-C₄ alkyl, and where [symbol] represents the point of attachment to L2.

[0095] In one embodiment, the compound has a structure:

[chemical structure]

[0096] In one embodiment, the compound has a structure:

[chemical structure]

[0097] In one embodiment, the compound has a structure:

[chemical structure]

[0098] In another aspect, the present disclosure provides a compound having a structure according to Formula (I):

[chemical structure]

[0099] wherein:
[0100] BA is an antibody or an antigen-binding fragment thereof;
[0101] Gln is a glutamine residue;
[0102] L1 is absent or a first linker;
[0103] B is a branching unit comprising

[chemical structure]

[0104] M is absent or a moiety having the structure

[chemical structure]

where R, R′, and R″ are independently at each occurrence hydrogen or a C₁-C₄ alkyl, or wherein R′ and R″ together form a 5-membered or a 6-membered ring;
[0105] Dxd is an anti-tumor agent having a structure according to Formula (P):

[chemical structure]

[0106] k is an integer from 1 to 12, and
[0107] n is an integer from 1 to 30.

[0108] In another aspect, the present disclosure provides a compound according to Formula (L2-P), (L2′-P), or (L2″-P):

B″-SP1-B2-(-SP2-AA-SP3-M-Dxd)ₚ (L2-P),

H₂N-SP1-B2-(-SP2-AA-SP3-M-Dxd)ₚ (L2′-P),

maleimide-N-SP1-B2-(-SP2-AA-SP3-M-Dxd)ₚ (L2″-P),

wherein:
[0109] B″ is selected from the group consisting of —N₃,

[chemical structure]

[0110] SP1 is absent or a first spacer unit selected from the group consisting of

[chemical structure]

[0111] SP2 is absent or a second spacer unit selected from the group consisting of a C₁₋₆ alkyl, —(CH₂—CH₂—O)ᵥ—, —NH—, —C(O)—, —NH—C(O)—, —NH—(CH₂)ᵤ—, —NH—(CH₂)ᵥ—C(O)—, —NH—(CH₂—CH₂—O)ᵥ—, —NH—(CH₂—CH₂—O)ᵥ—C(O)—, —NH—(CH₂—CH₂—O)ᵥ—(CH₂)ᵤ—, —NH—(CH₂—CH₂—O)ᵥ—(CH₂)ᵥ—C(O)—, —(CH₂)ᵤ—NH—C(O)—, —NH—(CH₂)ᵤ—NH—C(O)—, —NH—(CH₂)ᵥ—C(O)—NH—, or combinations thereof;
[0112] wherein subscripts u and v are independently an integer from 1 to 8;
[0113] AA is absent or a peptide unit comprising from 2 to 4 amino acids;
[0114] SP3 is absent or a third spacer unit selected from the group consisting of,

[chemical structure]

wherein R_{c} is independently at each occurrence absent or a group selected from

[chemical structure]

[0115] M is absent or

[chemical structure]

where R, R′, and R″ are independently at each occurrence hydrogen or a C₁-C₄ alkyl, or wherein R′ and R″ together form a 5-membered or a 6-membered ring; and
[0116] Dxd is an anti-tumor agent having a structure according to Formula (P):

[chemical structure]

and
[0117] p is an integer from 1 to 12.

[0118] In one embodiment, AA is a peptide unit comprising from 2 to 4 amino acids selected from glycine, valine, phenylalanine, proline, glutamic acid, lysine, alanine and citrulline, and combinations thereof.

[0119] In one embodiment, AA is valine-citrulline, valine-alanine, or phenylalanine-lysine.

[0120] In one embodiment, AA is selected from the group consisting of glycine-glycine-glycine (GGG), glycine-glycine-glycine-glycine (GGGG (SEQ ID NO: 2113)), glycine-glycine-phenylalanine (GGF), glycine-glycine-phenylalanine-glycine (GGFG (SEQ ID NO: 2114)) and glutamic acid-valine-citrulline (EVC).

[0121] In one embodiment, the compound has a structure selected from the group consisting of:

[chemical structure]

[chemical structure]

[chemical structure]

[chemical structure]

[0122] or a pharmaceutically acceptable salt thereof.

[0123] In one embodiment, the compound has a structure selected from the group consisting of:

[chemical structure]

[chemical structure]

[0124] or a pharmaceutically acceptable salt thereof.

[0125] In one embodiment, the compound has a structure according to Formula (L2-P), (L2′-P) or (L2″-P) selected from the group consisting of:

[chemical structure]

[chemical structure]

[chemical structure]

[chemical structure]

[chemical structure]

[chemical structure]

[chemical structure]

[0126] In another aspect, the present disclosure provides an antibody-drug conjugate according to formula (II):

[chemical structure]

[0127] wherein Ab is an antibody;
[0128] Gln is a glutamine residue;
[0129] L1 is absent or a first linker;
[0130] B is a branching unit comprising at least one adduct of group B′ and group B″, where
[0131] the group B′ is selected from —N₃

[chemical structure]

and at least one group B″, wherein
[0132] B″-SP1-B2-(-SP2-AA-SP3-M-Dxd)ₚ is the compound according to formula (L2-P) according to any of the preceding embodiments, and wherein the compound of formula (L2-P) is covalently attached to the antibody via the adduct of the group B′ and the group B″; k is an integer from 1 to 12, p is an integer from 1 to 30, and n is an integer from 1 to 30.

[0133] In one embodiment, the present disclosure provides an antibody-drug conjugate comprising an antibody and a linker-payload, wherein the linker-payload comprises the structure:

[chemical structure]

where [symbol] represents the point of attachment to the antibody, directly or through a second linker, or a pharmaceutically acceptable salt thereof.

[0134] In another aspect, the present disclosure provides a composition comprising a population of compounds according to any of the preceding embodiments, having a drug-antibody ratio (DAR) of about 0.5 to about 30.0.

[0135] In one embodiment, the composition according to the disclosure has a DAR of about 1.0 to about 2.5. In one embodiment, the composition according to the disclosure has a DAR of about 2.

[0136] In one embodiment, the composition according to the disclosure has a DAR of about 3.0 to about 4.5. In one embodiment, the composition according to the disclosure has a DAR of about 4.

[0137] In one embodiment, the composition according to the disclosure has a DAR of about 6.5 to about 8.5. In one embodiment, the composition according to the disclosure has a DAR of about 8.

[0138] In one embodiment, the composition according to the disclosure has a DAR of about 10 to about 14. In one embodiment, the composition according to the disclosure has a DAR of about 12.

[0139] In one embodiment, the composition according to the disclosure has a DAR of about 14 to about 18. In one embodiment, the composition according to the disclosure has a DAR of about 16.

[0140] In one embodiment, the composition according to the disclosure has a DAR of about 22 to about 24.5. In one embodiment, the composition according to the disclosure has a DAR of about 24.

[0141] In another aspect, the present disclosure provides a compound having a structure according to Formula (P-I):

[chemical structure]

[0142] wherein R₁, R₂, R₃, and R₄ are independently a hydrogen or a C₁-C₄ alkyl, or wherein R₂ and R₃ form a 5-membered or a 6-membered ring,
[0143] or a pharmaceutically acceptable salt thereof.

[0144] In one embodiment, the compound is

[chemical structure]

[0145] or a pharmaceutically acceptable salt thereof.

[0146] An antibody-drug conjugate comprising an antibody, a linker, and a payload, wherein the payload is

[chemical structure]

[0147] or a pharmaceutically acceptable salt thereof.

[0148] An antibody-drug conjugate comprising an antibody, a linker, and a payload, wherein the payload is

[chemical structure]

or a pharmaceutically acceptable salt thereof, where [symbol] represents the point of attachment to the linker.

[0149] In one embodiment, the compound has a structure according to Formula (P2):

[chemical structure]

[0150] wherein R is a hydrogen or a C₁-C₄ alkyl, or a pharmaceutically acceptable salt thereof.

[0151] In one embodiment, the compound is

[chemical structure]

or a pharmaceutically acceptable salt thereof.

[0152] In one aspect, the present invention provides a pharmaceutical composition comprising the compound according to any of the preceding embodiments, and a diluent, a carrier, and/or an excipient.

[0153] In one aspect, the present invention provides a method of treating a condition in a subject in need thereof comprising administering to the subject a therapeutically effective amount of the compound according to any of the preceding embodiments, or the composition of any one of the preceding embodiments.

[0154] In one embodiment, the condition is cancer.

[0155] In one embodiment, the cancer is selected from the group consisting of breast cancer, ovarian cancer, prostate cancer, lung cancer, liver cancer, or brain cancer.

[0156] In one embodiment, the condition is HER2+ breast cancer.

[0157] In one aspect, the present invention provides a method of selectively delivering a compound into a cell, wherein the compound is according to any one of the preceding embodiments.

[0158] In one aspect, the present invention provides a method of selectively targeting an antigen on a surface of a cell with a compound, wherein the compound is according to any one of the preceding embodiments.

[0159] In one embodiment, the cell is a mammalian cell.

[0160] In one embodiment, the cell is a human cell.

[0161] In one embodiment, the cell is a cancer cell.

[0162] In one embodiment, the cancer cell is selected from the group consisting of a breast cancer cell, an ovarian cancer cell, a prostate cancer cell, a lung cancer cell, a liver cancer cell, or a brain cancer cell.

[0163] In one aspect, the present disclosure provides a method of producing a compound having a structure according to Formula (A):

[chemical structure]

[0164] wherein BA is an antibody or an antigen-binding fragment thereof;
[0165] Gln is a glutamine residue;
[0166] L1 is a first linker;
[0167] B is a branching unit comprising at least one adduct of a group B′ and a group B″;
[0168] L2 is a second linker covalently attached to the branching unit B via at least one group B″
[0169] M is absent or

[chemical structure]

where R, R′, and R″ are independently at each occurrence hydrogen or a C₁-C₄ alkyl, or wherein R′ and R″ together form a 5-membered or a 6-membered ring;
[0170] Dxd is an anti-tumor agent comprising a structure according to Formula (P):

[chemical structure]

[0171] k and m are independently an integer from 1 to 12, and n is an integer from 1 to 30, wherein:
[0172] the method comprises the steps of:
   [0173] a) contacting, in the presence of a transglutaminase, the BA comprising at least one glutamine residue Gln (BA-Gln-NH₂) with a compound L1-B, wherein the branching unit B comprises the at least one group B′,
   [0174] b) contacting the product of step a) with k or more equivalents of a compound L2-(-M-Dxd)ₘ, wherein the linker L2 comprises at least one group B″,
[0175] wherein one of the groups B′ and B″ is selected from —N₃ and

[chemical structure]

and the other of the groups B′ and B″ is selected from

[chemical structure]

where Q is C or N; and
   [0176] c) isolating the produced compound of Formula (I).

[0177] In one aspect, the present disclosure provides a method of producing a compound having a structure according to Formula (A):

[chemical structure]

wherein BA is an antibody or an antigen-binding fragment thereof; Gln is a glutamine residue; L1 is a first linker as described above; B is a branching unit comprising at least one adduct of a group B′ and a group B″ as described above; L2 is a second linker as described above covalently attached to the branching unit B via at least one group B″ as described above; M is absent or

[chemical structure]

where R, R′, and R″ are as described above; Dxd is an anti-tumor agent comprising a structure according to Formula (P):

[chemical structure]

k and m are independently an integer from 1 to 12, and n is an integer from 1 to 30, wherein:
[0178] the method comprises the steps of:
   [0179] a) contacting a compound L1-B, wherein the branching unit B comprises the at least one group B′, with k or more equivalents of a compound L2-(-M-Dxd)ₘ, wherein the linker L2 comprises at least one group B″ capable of covalently binding with the group B′,
   [0180] wherein one of the groups B′ and B″ is selected from —N₃ and

[chemical structure]

and the other of the groups B′ and B″ is selected from

[chemical structure]

[0181] where Q is C or N;
[0182] thereby producting L1-B-(-L2-(-M-Dxd)ₘ)ₖ;
[0183] b) contacting, in the presence of a transglutaminase, the BA comprising at least one glutamine residue Gln (BA-Gln-NH₂) with the L1-B-(-L2-(-M-Dxd)ₘ)ₖ product of step a), and
[0184] c) isolating the produced compound of Formula (I).

[0185] In one aspect, the present disclosure provides a method of producing a compound having a structure according to Formula (I):

[chemical structure]

[0186] wherein BA is an antibody or an antigen-binding fragment thereof;
[0187] Gln is a glutamine residue;
[0188] L1 is a first linker;
[0189] B is a branching unit comprising at least one adduct of a group B′ and a group B″;
[0190] L2 is a second linker covalently attached to the branching unit B via at least one group B″;
[0191] M is absent or

[chemical structure]

where R, R′, and R″ are independently at each occurrence hydrogen or a C₁-C₄ alkyl, or wherein R′ and R″ together form a 5-membered or a 6-membered ring;
[0192] Dxd is an anti-tumor agent comprising a structure according to Formula (P):

[chemical structure]

[0193] k is an integer from 1 to 12, and n is an integer from 1 to 30, wherein:
[0194] the method comprises the steps of:
   [0195] a) contacting, in the presence of a transglutaminase, the BA comprising at least one glutamine residue Gln (BA-Gln-NH₂) with a compound L1-B, wherein the branching unit B comprises the at least one group B′,
   [0196] b) contacting the product of step a) with k or more equivalents of a compound L2-M-Dxd, wherein the linker L2 comprises the at least one group B″ capable of covalently attaching to the group B′,
[0197] wherein one of the groups B′ and B″ is selected from —N₃ and

[chemical structure]

and the other of the groups B′ and B″ is selected from

[chemical structure]

[0198] where Q is C or N; and
   [0199] c) isolating the produced compound of Formula (I).

[0200] In one aspect, the present disclosure provides a method of producing a compound having a structure according to Formula (I):

[chemical structure]

wherein BA is an antibody or an antigen-binding fragment thereof; Gln is a glutamine residue; L1 is a first linker as described above; B is a branching unit comprising at least one adduct of a group B′ and a group B″ as described above; L2 is a second linker as described above covalently attached to the branching unit B via at least one group B″ as described above; M is absent or

[chemical structure]

where R, R′, and R″ are as described above; Dxd is an anti-tumor agent comprising a structure according to Formula (P):

[chemical structure]

k is an integer from 1 to 12, and n is an integer from 1 to 30, wherein:
[0201] the method comprises the steps of:
   [0202] a) contacting a compound L1-B, wherein the branching unit B comprises the at least one group B′ with k or more equivalents of a compound L2-M-Dxd, wherein the linker L2 comprises at least one group B″, thereby producting L1-B-(-L2-M-Dxd)ₖ, wherein one of the groups B′ and B″ is selected from —N₃ and

[chemical structure]

and the other of the groups B′ and B″ is selected from

[chemical structure]

where Q is C or N;
[0203] b) contacting, in the presence of a transglutaminase, the binding agent BA comprising at least one glutamine residue Gln (BA-Gln-NH₂) with the L1-B-(-L2-M-Dxd)ₖ product of step a), and
[0204] c) isolating the produced compound of Formula (I).

[0205] In one aspect, the present disclosure provides a method of producing a compound having a structure according to Formula (III):

[chemical structure]

[0206] wherein BA is an antibody or an antigen-binding fragment thereof; Gln is a glutamine residue; L2′-P is H₂N-SP1-B2-(-SP2-AA-SP3-M-Dxd)p as described above, and n is an integer from 1 to 30;
[0207] SP1 is absent or a first spacer unit selected from the group consisting of

[chemical structure]

[0208] B2 is absent or a branching unit;
[0209] SP2 is absent or a second spacer unit selected from the group consisting of a C₁₋₆ alkyl, —(CH₂—CH₂—O)ᵥ—, —NH—, —C(O)—, —NH—C(O)—, —NH—(CH₂)ᵤ—, —NH—(CH₂)ᵥ—C(O)—, —NH—(CH₂—CH₂—O)ᵥ—, —NH—(CH₂—CH₂—O)ᵥ—C(O)—, —NH—(CH₂—CH₂—O)ᵥ—(CH₂)ᵤ—, —NH—(CH₂—CH₂—O)ᵥ—(CH₂)ᵥ—C(O)—, —(CH₂)ᵤ—NH—C(O)—, —NH—(CH₂)ᵤ—NH—C(O)—, —NH—(CH₂)ᵥ—C(O)—NH—, or combinations thereof; wherein subscripts u and v are independently an integer from 1 to 8;
[0210] AA is absent or a peptide unit comprising from 2 to 4 amino acids;
[0211] SP3 is absent or a third spacer unit selected from the group consisting of,

[chemical structure]

wherein R_{c} is independently at each occurrence absent or a group selected from OH and OH

[chemical structure]

[0212] M is absent or

[chemical structure]

where R, R′, and R″ are independently at each occurrence hydrogen or a C₁-C₄ alkyl, or wherein R′ and R″ together form a 5-membered or a 6-membered ring; and
[0213] Dxd is an anti-tumor agent having a structure according to Formula (P):

[chemical structure]

p is an integer from 1 to 30;
wherein the method comprises the steps of:
[0214] b) contacting, in the presence of a transglutaminase, the BA comprising at least one glutamine residue Gln (BA-Gin-NH₂) with the L2′-P, and
[0215] c) isolating the produced compound of Formula (III).

[0216] In one embodiment, the glutamine residue Gln is naturally present in a CH₂ or CH₃ domain of the BA.

[0217] In one embodiment, wherein the glutamine residue Gln is introduced to the BA by modifying one or more amino acids.

[0218] In one embodiment, wherein the Gln is Q295 or N297Q.

[0219] In one embodiment, wherein the transglutaminase is microbial transglutaminase (MTG).

[0220] In one embodiment, M is absent, or the M-Dxd has a structure selected from the group consisting of

[chemical structure]

[0221] wherein R is a hydrogen or a C₁-C₄ alkyl, and where [symbol] represents the point of attachment to L2.

[0222] In one embodiment, the compound L2-Dxd has a structure selected from the group consisting of:

[chemical structure]

[chemical structure]

[chemical structure]

[0223] or a pharmaceutically acceptable salt thereof.

[0224] In one embodiment, the compound L2-Dxd has a structure selected from the group consisting of:

[chemical structure]

[chemical structure]

[chemical structure]

[chemical structure]

[chemical structure]

[chemical structure]

[chemical structure]

[chemical structure]

or a pharmaceutically acceptable salt thereof.

[0225] In one embodiment, the compound L2-Dxd has a structure selected from the group consisting of:

[chemical structure]

[chemical structure]

[chemical structure]

[chemical structure]

[chemical structure]

[chemical structure]

[0226] These and other aspects of the present disclosure will become apparent to those skilled in the art after a reading of the following detailed description of the disclosure, including the appended claims.

### BRIEF DESCRIPTION OF THE DRAWINGS

[0227] The patent or application file contains at least one drawing executed in color. Copies of this patent or patent application publication with color drawing(s) will be provided by the Office upon request and payment of the necessary fee.

[0228] FIG. 1 is a schematic demonstrating two-step site-specific generation of Dxd-ADCs according to an embodiment of the disclosure. The first step is conjugation of one or more first linkers (L1-B′) with a glutamine residue on an antibody via a transglutaminase (e.g., MTG)-mediated conjugation reaction. The second step is conjugation of antibody-L1-B to one or more Linker 2-Payloads (L_2P).

[0229] FIGS. 2A and 2B are schematics demonstrating specific non-limiting embodiments of the disclosure. FIG. 2A is a schematic of a two-step site-specific generation of Dxd-ADCs with glutamine residues at position 295 having a DAR of 2 times n times m according to an embodiment of the present disclosure. FIG. 2B is a schematic of a two-step site-specific generation of Dxd-ADCs with a glutamine residue at positions 295 and 297 having a DAR of 4 times n times m according to an embodiment of the present disclosure.

[0230] FIG. 3A is a schematic demonstrating two-step site-specific generation of one specific embodiment of a Dxd-ADC according to the disclosure. The first step is to conjugate a linear first linker 1 (L1-B′) comprising one azide moiety (—N₃) to glutamine residues at positions 295 and 297 of an antibody via an MTG-mediated conjugation reaction, generating an antibody having 4 azide-comprising linkers attached to it (Ab-(N₃)₄). The second step is to attach Ab-(N₃)₄ to a specific Linker2-Payload (L2P) via the azide-cycloalkyne 1,3 cycloaddition reaction, generating a Dxd-ADC with a DAR of 4. FIG. 3B depicts schematics of ADCs and exemplary amino azido linkers having a DAR of 2 or 4 suitable for use in an embodiment of the present disclosure depicted in FIG. 3A.

[0231] FIG. 4A is a schematic demonstrating two-step site-specific generation of one specific embodiment of a Dxd-ADC according to the disclosure. The first step is to conjugate a branched first linker 1 (L1-B′) comprising two azide moieties (—N₃) to glutamine residues at positions 295 and 297 of an antibody via an MTG-mediated conjugation reaction, generating an antibody having 8 azide-comprising linkers attached to it (Ab-(N₃)₈). The second step is to attach Ab-(N₃)₈ to a specific Linker2-Payload (L2P) via the azide-cycloalkyne 1,3 cycloaddition reaction, generating a Dxd-ADC with a DAR of 8. FIG. 4B depicts schematics of ADCs and exemplary branched alkyl azide amine linkers suitable for use in an embodiment of the present disclosure depicted in FIG. 4A.

[0232] FIGS. 5A and 5B are schematics demonstrating three approaches to producing site-specific ADCs with DAR4 to DAR24 on Antibody-Q295/297 according to an embodiment of the disclosure.

[0233] FIGS. 6A and 6B are schematics demonstrating three approaches to producing site-specific ADCs with DAR2 to DAR12 on Antibody-Q295 according to an embodiment of the disclosure.

[0234] FIG. 7A is a schematic demonstrating two-step Approach I for making an exemplary 8DAR Branch-Linker-Payload ADC (Ab-AL1-LP39). FIG. 7B is a schematic demonstrating two-step Approach II for making an exemplary 8DAR Branch-Linker-Payload ADC (Ab-BL2-LP22). FIG. 7C is a schematic demonstrating one-step Approach III for making 4DAR ADC with Linear-Linker-P and 8DAR ADC with Branch-Linker-Payload.

[0235] FIG. 8A (SNU16, FGFR2-amplified gastric cancer) and FIG. 8B (SNU16 tumor bearing mice) show tumor volume vs. days after treatment for anti-FGFR2b Dxd ADCs (DAR8) according to the disclosure. These ADCs demonstrated significant anti-tumor efficacy against SNU-16 human gastric cancer xenografts.

[0236] FIG. 9A (SNU16, FGFR2-amplified gastric cancer) and FIG. 9B (SNU16 tumor bearing mice) show tumor volume vs. days after treatment for anti-FGFR2b Dxd ADCs (DAR4) according to the disclosure. These ADCs demonstrated significant anti-tumor efficacy against SNU-16 human gastric cancer xenografts.

[0237] FIG. 10 is a matrix illustrating the components of 272 exemplary MET×MET bispecific antibodies disclosed herein. Each numbered cell of the matrix identifies a unique bispecific antibody comprising a “D1” antigen binding domain and a “D2” antigen binding domain, wherein the D1 antigen binding domain comprises the immunoglobulin variable domain (HCVR/LCVR amino acid sequence pair) or CDRs from the corresponding anti-MET antibody listed along the Y-axis, and wherein the D2 antigen binding domain comprises the immunoglobulin variable domain (HCVR/LCVR amino acid sequence pair) or CDRs from the corresponding anti-MET antibody listed along the X-axis.

### DETAILED DESCRIPTION

[0238] Detailed embodiments of the present disclosure are disclosed herein; however, it is to be understood that the disclosed embodiments are merely illustrative of the disclosure that may be embodied in various forms. In addition, each of the examples given in connection with the various embodiments of the disclosure is intended to be illustrative, and not restrictive. Therefore, specific structural and functional details disclosed herein are not to be interpreted as limiting, but merely as a representative basis for teaching one skilled in the art to variously employ the present disclosure.

### Definitions

[0239] Unless defined otherwise, all technical and scientific terms used herein have the same meaning as commonly understood by one of ordinary skill in the art to which this disclosure belongs.

[0240] As used in this specification and the appended claims, the singular forms “a”, “an”, and “the” include plural references unless the context clearly dictates otherwise. Thus, for example, a reference to “a method” includes one or more methods, and/or steps of the type described herein and/or which will become apparent to those persons skilled in the art upon reading this disclosure.

[0241] The terms “treat” or “treatment” of a state, disorder or condition include: (1) preventing, delaying, or reducing the incidence and/or likelihood of the appearance of at least one clinical or sub-clinical symptom of the state, disorder or condition developing in a subject that may be afflicted with or predisposed to the state, disorder or condition but does not yet experience or display clinical or subclinical symptoms of the state, disorder or condition; or (2) inhibiting the state, disorder or condition, i.e., arresting, reducing or delaying the development of the disease or a relapse thereof or at least one clinical or sub-clinical symptom thereof; or (3) relieving the disease, i.e., causing regression of the state, disorder or condition or at least one of its clinical or sub-clinical symptoms. The benefit to a subject to be treated is either statistically significant or at least perceptible to the patient or to the physician. In some embodiments, treatment comprises methods wherein cells are ablated in such manner where disease is indirectly impacted. In certain embodiments, treatment comprises depleting immune cells as a hematopoietic conditioning regimen prior to therapy.

[0242] A “subject” or “patient” or “individual” or “animal”, as used herein, refers to humans, veterinary animals (e.g., cats, dogs, cows, horses, sheep, pigs, etc.) and experimental animal models of diseases (e.g., mice, rats). In a preferred embodiment, the subject is a human.

[0243] As used herein the term “effective” applied to dose or amount refers to that quantity of a compound or pharmaceutical composition that is sufficient to result in a desired activity upon administration to a subject in need thereof. Note that when a combination of active ingredients is administered, the effective amount of the combination may or may not include amounts of each ingredient that would have been effective if administered individually. The exact amount required will vary from subject to subject, depending on the species, age, and general condition of the subject, the severity of the condition being treated, the particular drug or drugs employed, the mode of administration, and the like.

[0244] The phrase “pharmaceutically acceptable salt”, as used in connection with compositions of the disclosure, refers to any salt suitable for administration to a patient. Suitable salts include, but are not limited to, those disclosed in Berge et al., “Pharmaceutical Salts”, J. Pharm. Sci., 1977, 66:1, incorporated herein by reference. Examples of salts include, but are not limited to, acid derived, base derived, organic, inorganic, amine, and alkali or alkaline earth metal salts, including but not limited to calcium salts, magnesium salts, potassium salts, sodium salts, salts of hydrochloric acid, hydrobromic acid, sulfuric acid, nitric acid, phosphoric acid, acetic acid, propionic acid, glycolic acid, pyruvic acid, oxalic acid, maleic acid, malonic acid, succinic acid, fumaric acid, tartaric acid, citric acid, benzoic acid, cinnamic acid, mandelic acid, methane sulfonic acid, ethane sulfonic acid, p toluene sulfonic acid, salicylic acid, and the like. In some examples, a payload described herein (e.g., a rifamycin analog described herein) comprises a tertiary amine, where the nitrogen atom in the tertiary amine is the atom through which the payload is bonded to a linker or a linker-spacer. In such instances, bonding to the tertiary amine of the payload yields a quaternary amine in the linker-payload molecule. The positive charge on the quaternary amine can be balanced by a counter ion (e.g., chloro, bromo, iodo, or any other suitably charged moiety such as those described herein).

[0245] Ranges can be expressed herein as from “about” or “approximately” one particular value and/or to “about” or “approximately” another particular value. When such a range is expressed, another embodiment includes from the one particular value and/or to the other particular value.

[0246] By “comprising” or “containing” or “including” is meant that at least the named compound, element, particle, or method step is present in the composition or article or method, but does not exclude the presence of other compounds, materials, particles, or method steps, even if the other such compounds, material, particles, or method steps have the same function as what is named.

[0247] Compounds of the present disclosure include those described generally herein, and are further illustrated by the classes, subclasses, and species disclosed herein. As used herein, the following definitions shall apply unless otherwise indicated. For purposes of this disclosure, the chemical elements are identified in accordance with the Periodic Table of the Elements, CAS version, Handbook of Chemistry and Physics, 75th Ed. Additionally, general principles of organic chemistry are described in “Organic Chemistry”, Thomas Sorrell, University Science Books, Sausalito: 1999, and “March's Advanced Organic Chemistry”, 5th Ed., Ed.: Smith, M. B. and March, J., John Wiley & Sons, New York: 2001, the entire contents of which are hereby incorporated by reference.

[0248] As used herein, the term “alkyl” is given its ordinary meaning in the art and may include saturated aliphatic groups, including straight-chain alkyl groups, branched-chain alkyl groups, cycloalkyl (alicyclic) groups, alkyl substituted cycloalkyl groups, and cycloalkyl substituted alkyl groups. In certain embodiments, a straight chain or branched chain alkyl has about 1-20 carbon atoms in its backbone (e.g., C₁-C₂₀ for straight chain, C₂-C₂₀ for branched chain), and alternatively, about 1-10 carbon atoms, or about 1 to 6 carbon atoms. In some embodiments, a cycloalkyl ring has from about 3-10 carbon atoms in their ring structure where such rings are monocyclic or bicyclic, and alternatively about 5, 6 or 7 carbons in the ring structure. In some embodiments, an alkyl group may be a lower alkyl group, wherein a lower alkyl group comprises 1-4 carbon atoms (e.g., C₁-C₄ for straight chain lower alkyls).

[0249] As used herein, the term “alkenyl” refers to an alkyl group, as defined herein, having one or more double bonds.

[0250] As used herein, the term “alkynyl” refers to an alkyl group, as defined herein, having one or more triple bonds.

[0251] The term “heteroatom” means one or more of oxygen, sulfur, nitrogen, phosphorus, or silicon (including, any oxidized form of nitrogen, sulfur, phosphorus, or silicon; the quaternized form of any basic nitrogen or; a substitutable nitrogen of a heterocyclic ring.

[0252] The term “halogen” means F, Cl, Br, or I; the term “halide” refers to a halogen radical or substituent, namely —F, —Cl, —Br, or —I.

[0253] The term “adduct”, e.g., “an adduct of group B′” of the present disclosure encompasses any moiety comprising the product of an addition reaction, e.g., an addition reaction of group B′, independent of the synthetic steps taken to produce the moiety.

[0254] The term “covalent attachment” means formation of a covalent bond, i.e., a chemical bond that involves sharing of one or more electron pairs between two atoms. Covalent bonding may include different interactions, including but not limited to σ-bonding, π-bonding, metal-to-metal bonding, agostic interactions, bent bonds, and three-center two-electron bonds. When a first group is said to be “capable of covalently attaching” to a second group, this means that the first group is capable of forming a covalent bond with the second group, directly or indirectly, e.g., through the use of a catalyst or under specific reaction conditions. Non-limiting examples of groups capable of covalently attaching to each other may include, e.g., an amine and a carboxylic acid (forming an amide bond), a diene and a dienophile (via a Diels-Alder reaction), and an azide and an alkyne (forming a triazole via a 1,3-cycloaddition reaction).

[0255] As described herein, compounds of the disclosure may contain “optionally substituted” moieties. In general, the term “substituted,” whether preceded by the term “optionally” or not, means that one or more hydrogens of the designated moiety are replaced with a suitable substituent. Unless otherwise indicated, an “optionally substituted” group may have a suitable substituent at each substitutable position of the group, and when more than one position in any given structure may be substituted with more than one substituent selected from a specified group, the substituent may be either the same or different at every position. Combinations of substituents envisioned by this disclosure are preferably those that result in the formation of stable or chemically feasible compounds. The term “stable,” as used herein, refers to compounds that are not substantially altered when subjected to conditions to allow for their production, detection, and, in certain embodiments, their recovery, purification, and use for one or more of the purposes disclosed herein.

[0256] Unless otherwise stated, structures depicted herein are also meant to include all isomeric (e.g., enantiomeric, diastereomeric, and geometric (or conformational)) forms of the structure; for example, the R and S configurations for each asymmetric center, (Z) and (E) double bond isomers, and (Z) and (E) conformational isomers. Therefore, single stereochemical isomers as well as enantiomeric, diastereomeric, and geometric (or conformational) mixtures of the present compounds are within the scope of the disclosure.

[0257] Unless otherwise stated, all tautomeric forms of the compounds of the disclosure are within the scope of the disclosure.

[0258] Additionally, unless otherwise stated, structures depicted herein are also meant to include compounds that differ only in the presence of one or more isotopically enriched atoms. For example, compounds having the present structures except for the replacement of hydrogen by deuterium or tritium, or the replacement of a carbon by a ¹¹C- or ¹³C- or ¹⁴C-enriched carbon are within the scope of this disclosure.

[0259] It is also to be understood that the mention of one or more method steps does not preclude the presence of additional method steps or intervening method steps between those steps expressly identified. Similarly, it is also to be understood that the mention of one or more components in a device or system does not preclude the presence of additional components or intervening components between those components expressly identified.

[0260] Unless otherwise stated, all crystalline forms of the compounds of the disclosure and salts thereof are also within the scope of the disclosure. The compounds of the disclosure may be isolated in various amorphous and crystalline forms, including without limitation forms which are anhydrous, hydrated, non-solvated, or solvated. Example hydrates include hemihydrates, monohydrates, dihydrates, and the like. In some embodiments, the compounds of the disclosure are anhydrous and non-solvated. By “anhydrous” is meant that the crystalline form of the compound contains essentially no bound water in the crystal lattice structure, i.e., the compound does not form a crystalline hydrate.

[0261] As used herein, “crystalline form” is meant to refer to a certain lattice configuration of a crystalline substance. Different crystalline forms of the same substance typically have different crystalline lattices (e.g., unit cells) which are attributed to different physical properties that are characteristic of each of the crystalline forms. In some instances, different lattice configurations have different water or solvent content. The different crystalline lattices can be identified by solid state characterization methods such as by X-ray powder diffraction (PXRD). Other characterization methods such as differential scanning calorimetry (DSC), thermogravimetric analysis (TGA), dynamic vapor sorption (DVS), solid state NMR, and the like further help identify the crystalline form as well as help determine stability and solvent/water content.

[0262] Crystalline forms of a substance include both solvated (e.g., hydrated) and non-solvated (e.g., anhydrous) forms. A hydrated form is a crystalline form that includes water in the crystalline lattice. Hydrated forms can be stoichiometric hydrates, where the water is present in the lattice in a certain water/molecule ratio such as for hemihydrates, monohydrates, dihydrates, etc. Hydrated forms can also be non-stoichiometric, where the water content is variable and dependent on external conditions such as humidity.

[0263] In some embodiments, the compounds of the disclosure are substantially isolated. By “substantially isolated” is meant that a particular compound is at least partially isolated from impurities. For example, in some embodiments a compound of the disclosure comprises less than about 50%, less than about 40%, less than about 30%, less than about 20%, less than about 15%, less than about 10%, less than about 5%, less than about 2.5%, less than about 1%, or less than about 0.5% of impurities. Impurities generally include anything that is not the substantially isolated compound including, for example, other crystalline forms and other substances.

[0264] Certain groups, moieties, substituents, and atoms are depicted with a wavy line. The wavy line can intersect or cap a bond or bonds. The wavy line indicates the atom through which the groups, moieties, substituents, or atoms are bonded. For example, a phenyl group that is substituted with a propyl group depicted as:

[chemical structure]

has the following structure:

[chemical structure]

[0265] The expression “HER2” or “human epidermal growth factor receptor 2” refers to a member of the human epidermal growth factor receptor family. The protein is also known as NEU; NGL; HER2; TKR1; CD340; HER-2; MLN 19; HER-2/neu. HER2 can refer to the amino acid sequence as set forth in NCBI accession No. NP_004439.2. Amplification or over-expression of this oncogene has been shown to play an important role in the development and progression of certain aggressive types of breast cancer. In recent years the protein has become an important biomarker and target of therapy for approximately 30% of breast cancer patient. All references to proteins, polypeptides and protein fragments herein are intended to refer to the human version of the respective protein, polypeptide or protein fragment unless explicitly specified as being from a non-human species. Thus, the expression “HER2” means human HER2 unless specified as being from a non-human species, e.g., “mouse HER2,” “monkey HER2,” etc.

[0266] The phrase “an antibody that binds HER2” or an “anti-HER2 antibody” includes antibodies and antigen-binding fragments thereof that specifically recognize HER2.

[0267] The phrase an “anti-HER2/HER2” antibody, e.g., an “anti-HER2/HER2 bispecific antibody” includes antibodies and antigen-binding fragments thereof that specifically recognize two different HER2 epitopes. In some embodiments, bispecific antibodies and antigen-binding fragments thereof comprise a first antigen-binding domain (D1) which specifically binds a first epitope of human HER2 and a second antigen-binding domain (D2) which specifically binds a second epitope of human HER2.

[0268] The expression “STEAP2,” as used herein, refers to six-transmembrane epithelial antigen of prostate 2. STEAP2 is an integral, six-transmembrane-spanning protein that is highly expressed in prostate epithelial cells and is a cell-surface marker for prostate cancer, for example STEAP2 was found to be expressed in significant levels on an LNCaP prostate cell line (Porkka, et al. Lab Invest 2002, 82:1573-1582). STEAP2 (UniProtKB/Swiss-Prot: Q8NFT2.3) is a 490-amino acid protein encoded by STEAP2 gene located at the chromosomal region 7q21 in humans, see e.g., the amino acid sequence of human STEAP2 as set forth in Tables 1 and 2.

[0269] As used herein, “an antibody that binds STEAP2” or an “anti-STEAP2 antibody” includes antibodies and antigen-binding fragments thereof that specifically recognize STEAP2.

[0270] The phrase “an antibody that binds MET” or an “anti-MET antibody” includes antibodies and antigen-binding fragments thereof that specifically recognize MET. The expressions “MET,” “c-Met,” and the like, as used herein, refer to the human membrane spanning receptor tyrosine kinase.

[0271] The phrase an “anti-MET/MET” antibody, e.g., an “anti-MET/MET bispecific antibody” includes antibodies and antigen-binding fragments thereof that specifically recognize two different MET epitopes. In some embodiments, bispecific antibodies and antigen-binding fragments thereof comprise a first antigen-binding domain (D1) which specifically binds a first epitope of human MET and a second antigen-binding domain (D2) which specifically binds a second epitope of human MET.

[0272] All amino acid abbreviations used in this disclosure are those accepted by the United States Patent and Trademark Office as set forth in 37 C.F.R. § 1.822 (B)(J).

[0273] The term “protein” means any amino acid polymer having more than about 20 amino acids covalently linked via amide bonds. As used herein, “protein” includes biotherapeutic proteins, recombinant proteins used in research or therapy, trap proteins and other Fc-fusion proteins, chimeric proteins, antibodies, monoclonal antibodies, human antibodies, bispecific antibodies, antibody fragments, nanobodies, recombinant antibody chimeras, scFv fusion proteins, cytokines, chemokines, peptide hormones, and the like. Proteins can be produced using recombinant cell-based production systems, such as the insect bacculovirus system, yeast systems (e.g., Pichia sp.), mammalian systems (e.g., CHO cells and CHO derivatives like CHO-K1 cells).

[0274] All references to proteins, polypeptides and protein fragments herein are intended to refer to the human version of the respective protein, polypeptide or protein fragment unless explicitly specified as being from a non-human species. Thus, the expression “STEAP2” means human STEAP2 unless specified as being from a non-human species, e.g., “mouse STEAP2,” “monkey STEAP2,” etc.

[0275] The amino acid sequence of an antibody can be numbered using any known numbering schemes, including those described by Kabat et al., (“Kabat” numbering scheme); Al-Lazikani et al., 1997, J. Mol. Biol., 273:927-948 (“Chothia” numbering scheme); MacCallum et al., 1996, J. Mol. Biol. 262:732-745 (“Contact” numbering scheme); Lefranc et al., Dev. Comp. Immunol., 2003, 27:55-77 (“IMGT” numbering scheme); and Honegge and Pluckthun, J. Mol. Biol., 2001, 309:657-70 (“AHo” numbering scheme). Unless otherwise specified, the numbering scheme used herein is the Kabat numbering scheme. However, selection of a numbering scheme is not intended to imply differences in sequences where they do not exist, and one of skill in the art can readily confirm a sequence position by examining the amino acid sequence of one or more antibodies. Unless stated otherwise, the “EU numbering scheme” is generally used when referring to a residue in an antibody heavy chain constant region (e.g., as reported in Kabat et al., supra).

[0276] The term “glutaminyl-modified antibody” refers to an antibody with at least one covalent linkage from a glutamine side chain to a primary amine compound of the present disclosure. In particular embodiments, the primary amine compound is linked through an amide linkage on the glutamine side chain. In certain embodiments, the glutamine is an endogenous glutamine. In other embodiments, the glutamine is an endogenous glutamine made reactive by polypeptide engineering (e.g., via amino acid deletion, insertion, substitution, or mutation on the polypeptide). In additional embodiments, the glutamine is polypeptide engineered with an acyl donor glutamine-containing tag (e.g., glutamine-containing peptide tags, Q-tags or TGase recognition tag).

[0277] The term “TGase recognition tag” refers to a sequence of amino acids comprising an acceptor glutamine residue and that when incorporated into (e.g., appended to) a polypeptide sequence, under suitable conditions, is recognized by a TGase and leads to cross-linking by the TGase through a reaction between an amino acid side chain within the sequence of amino acids and a reaction partner. The recognition tag may be a peptide sequence that is not naturally present in the polypeptide comprising the TGase recognition tag. In some embodiments, the TGase recognition tag comprises at least one Gln. In some embodiments, the TGase recognition tag comprises an amino acid sequence XXQX (SEQ ID NO: 1935), wherein X is any amino acid (e.g., conventional amino acid Leu, Ala, Gly, Ser, Val, Phe, Tyr, His, Arg, Asn, Glu, Asp, Cys, Gln, lie, Met, Pro, Thr, Lys, or Trp or nonconventional amino acid). In some embodiments, the acyl donor glutamine-containing tag comprises an amino acid sequence selected from the group consisting of LLQGG (SEQ ID NO:1936), LLQG (SEQ ID NO:1937), LSLSQG (SEQ ID NO:1938), gGGLLQGG (SEQ ID NO:1939), gLLQG (SEQ ID NO:1940), LLQ, gSPLAQSHGG (SEQ ID NO:1941), gLLQGGG (SEQ ID NO:1942), gLLQGG (SEQ ID NO:1943), gLLQ (SEQ ID NO:1944), LLQLLQGA (SEQ ID NO:1945), LLQGA (SEQ ID NO:1946), LLQYQGA (SEQ ID NO:1947), LLQGSG (SEQ ID NO:1948), LLQYQG (SEQ ID NO:1949), LLQLLQG (SEQ ID NO:1950), SLLQG (SEQ ID NO:1951), LLQLQ (SEQ ID NO:1952), LLQLLQ (SEQ ID NO:1953), and LLQGR (SEQ ID NO:1954). See for example, WO2012059882, the entire contents of which are incorporated herein.

[0278] The term “antibody,” as used herein, means any antigen-binding molecule or molecular complex comprising at least one complementarity determining region (CDR) that specifically binds to or interacts with a particular antigen. The term “antibody” includes immunoglobulin molecules comprising four polypeptide chains, two heavy (H) chains and two light (L) chains inter-connected by disulfide bonds, as well as multimers thereof (e.g., IgM). Each heavy chain comprises a heavy chain variable region (abbreviated herein as HCVR or VH) and a heavy chain constant region. The heavy chain constant region comprises three domains, CH₁, CH₂, and CH₃. Each light chain comprises a light chain variable region (abbreviated herein as LCVR or VL) and a light chain constant region. The light chain constant region comprises one domain (CL1). The VH and VL regions can be further subdivided into regions of hypervariability, termed complementarity determining regions (CDRs), interspersed with regions that are more conserved, termed framework regions (FR). Each VH and VL is composed of three CDRs and four FRs, arranged from amino-terminus to carboxy-terminus in the following order: FR1, CDR1, FR2, CDR2, FR3, CDR3, FR4. In different embodiments, the FRs of the antibody (or antigen-binding portion thereof) can be identical to the human germline sequences, or can be naturally or artificially modified. An amino acid consensus sequence can be defined based on a side-by-side analysis of two or more CDRs.

[0279] The term “antibody,” as used herein, also includes antigen-binding fragments of full antibody molecules. The terms “antigen-binding portion” of an antibody, “antigen-binding fragment” of an antibody, and the like, as used herein, include any naturally occurring, enzymatically obtainable, synthetic, or genetically engineered polypeptide or glycoprotein that specifically binds an antigen to form a complex. Antigen-binding fragments of an antibody can be derived, e.g., from full antibody molecules using any suitable standard techniques such as proteolytic digestion or recombinant genetic engineering techniques involving the manipulation and expression of DNA encoding antibody variable and optionally constant domains. Such DNA is known and/or is readily available from, e.g., commercial sources, DNA libraries (including, e.g., phage-antibody libraries), or can be synthesized. The DNA can be sequenced and manipulated chemically or by using molecular biology techniques, for example, to arrange one or more variable and/or constant domains into a suitable configuration, or to introduce codons, create cysteine residues, modify, add or delete amino acids, etc.

[0280] Non-limiting examples of antigen-binding fragments include: (i) Fab fragments; (ii) F(ab′)2 fragments; (iii) Fd fragments; (iv) Fv fragments; (v) single-chain Fv (scFv) molecules; (vi) dAb fragments; and (vii) minimal recognition units consisting of the amino acid residues that mimic the hypervariable region of an antibody (e.g., an isolated complementarity determining region (CDR) such as a CDR3 peptide), or a constrained FR3-CDR3-FR4 peptide. Other engineered molecules, such as domain-specific antibodies, single domain antibodies, domain-deleted antibodies, chimeric antibodies, CDR-grafted antibodies, diabodies, triabodies, tetrabodies, minibodies, nanobodies (e.g., monovalent nanobodies, bivalent nanobodies, etc.), small modular immunopharmaceuticals (SMIPs), and shark variable IgNAR domains, are also encompassed within the expression “antigen-binding fragment,” as used herein.

[0281] An antigen-binding fragment of an antibody will typically comprise at least one variable domain. The variable domain can be of any size or amino acid composition and will generally comprise at least one CDR which is adjacent to or in frame with one or more framework sequences. In antigen-binding fragments having a VH domain associated with a VL domain, the VH and VL domains can be situated relative to one another in any suitable arrangement. For example, the variable region can be dimeric and contain VH-VH, VH-VL or VL-VL dimers.

[0282] Alternatively, the antigen-binding fragment of an antibody can contain a monomeric VH or VL domain.

[0283] In certain embodiments, an antigen-binding fragment of an antibody can contain at least one variable domain covalently linked to at least one constant domain. Non-limiting, exemplary configurations of variable and constant domains that can be found within an antigen-binding fragment of an antibody of the present description include: (i) VH-CH₁; (ii) VH-CH₂; (iii) VH-CH₃; (iv) VH-CH₁—CH₂; (V) VH-CH₁—CH₂—CH₃; (vi) VH-CH₂—CH₃; (vii) VH-CL; (viii) VL-CH₁; (ix) VL-CH₂; (x) VL-CH₃; (xi) VL-CH₁—CH₂; (xii) VL-CH₁—CH₂—CH₃; (xiii) VL-CH₂—CH₃; and (xiv) VL-CL. In any configuration of variable and constant domains, including any of the exemplary configurations listed herein, the variable and constant domains can be either directly linked to one another or can be linked by a full or partial hinge or linker region. A hinge region can consist of at least 2 (e.g., 5, 10, 15, 20, 40, 60, or more) amino acids which result in a flexible or semi-flexible linkage between adjacent variable and/or constant domains in a single polypeptide molecule.

[0284] Moreover, an antigen-binding fragment of an antibody of the present description can comprise a homo-dimer or hetero-dimer (or other multimer) of any of the variable and constant domain configurations listed herein in non-covalent association with one another and/or with one or more monomeric VH or VL domain (e.g., by disulfide bond(s)).

[0285] As with full antibody molecules, antigen-binding fragments can be monospecific or multispecific (e.g., bispecific). A multispecific antigen-binding fragment of an antibody will typically comprise at least two different variable domains, wherein each variable domain is capable of specifically binding to a separate antigen or to a different epitope on the same antigen. Any multispecific antibody format, including the exemplary bispecific antibody formats disclosed herein, can be adapted for use in the context of an antigen-binding fragment of an antibody of the present description using routine techniques available in the art.

[0286] The antibodies of the present description can function through complement-dependent cytotoxicity (CDC) or antibody-dependent cell-mediated cytotoxicity (ADCC). “Complement-dependent cytotoxicity” (CDC) refers to lysis of antigen-expressing cells by an antibody of the description in the presence of complement. “Antibody-dependent cell-mediated cytotoxicity” (ADCC) refers to a cell-mediated reaction in which nonspecific cytotoxic cells that express Fc receptors (FcRs) (e.g., Natural Killer (NK) cells, neutrophils, and macrophages) recognize bound antibody on a target cell and thereby lead to lysis of the target cell. CDC and ADCC can be measured using assays that are well known and available in the art. (See, e.g., U.S. Pat. Nos. 5,500,362 and 5,821,337, and Clynes et al. (1998) Proc. Natl. Acad. Sci. (USA) 95:652-656). The constant region of an antibody is important in the ability of an antibody to fix complement and mediate cell-dependent cytotoxicity. Thus, the isotype of an antibody can be selected on the basis of whether it is desirable for the antibody to mediate cytotoxicity.

[0287] In certain embodiments, the antibodies of the description, e.g., anti-HER2 antibodies, or anti-HER2/HER2 bispecific antibodies, or anti-MET antibodies, or anti-MET/MET bispecific antibodies, or anti-STEAP2 antibodies, are human antibodies. The term “human antibody,” as used herein, is intended to include antibodies having variable and constant regions derived from human germline immunoglobulin sequences. The human antibodies of the description can include amino acid residues not encoded by human germline immunoglobulin sequences (e.g., mutations introduced by random or site-specific mutagenesis in vitro or by somatic mutation in vivo), for example in the CDRs and in particular CDR3. However, the term “human antibody,” as used herein, is not intended to include antibodies in which CDR sequences derived from the germline of another mammalian species, such as a mouse, have been grafted onto human framework sequences.

[0288] The antibodies can, in some embodiments, be recombinant human antibodies. The term “recombinant human antibody,” as used herein, is intended to include all human antibodies that are prepared, expressed, created or isolated by recombinant means, such as antibodies expressed using a recombinant expression vector transfected into a host cell (described further below), antibodies isolated from a recombinant, combinatorial human antibody library (described further below), antibodies isolated from an animal (e.g., a mouse) that is transgenic for human immunoglobulin genes (See, e.g., Taylor et al. (1992) Nucl. Acids Res. 20:6287-6295) or antibodies prepared, expressed, created or isolated by any other means that involves splicing of human immunoglobulin gene sequences to other DNA sequences. Such recombinant human antibodies have variable and constant regions derived from human germline immunoglobulin sequences. In certain embodiments, however, such recombinant human antibodies are subjected to in vitro mutagenesis (or, when an animal transgenic for human Ig sequences is used, in vivo somatic mutagenesis) and thus the amino acid sequences of the VH and VL regions of the recombinant antibodies are sequences that, while derived from and related to human germline VH and VL sequences, may not naturally exist within the human antibody germline repertoire in vivo.

[0289] Human antibodies can exist in two forms that are associated with hinge heterogeneity. In one form, an immunoglobulin molecule comprises a stable four chain construct of approximately 150-160 kDa in which the dimers are held together by an interchain heavy chain disulfide bond. In a second form, the dimers are not linked via inter-chain disulfide bonds and a molecule of about 75-80 kDa is formed composed of a covalently coupled light and heavy chain (half-antibody). These forms have been extremely difficult to separate, even after affinity purification. The frequency of appearance of the second form in various intact IgG isotypes is due to, but not limited to, structural differences associated with the hinge region isotype of the antibody. A single amino acid substitution in the hinge region of the human IgG4 hinge can significantly reduce the appearance of the second form (Angal et al. (1993) Molecular Immunology 30: 105) to levels typically observed using a human IgG1 hinge. The instant description encompasses antibodies having one or more mutations in the hinge, CH₂ or CH₃ region which can be desirable, for example, in production, to improve the yield of the desired antibody form.

[0290] The antibodies of the description can be isolated or purified antibodies. An “isolated antibody” or “purified antibody,” as used herein, means an antibody that has been identified and separated and/or recovered from at least one component of its natural environment. For example, an antibody that has been separated or removed from at least one component of an organism, or from a tissue or cell in which the antibody naturally exists or is naturally produced, is an “isolated antibody” for purposes of the present description. For example, an antibody that has been purified from at least one component of a reaction or reaction sequence, is a “purified antibody” or results from purifying the antibody. An isolated antibody also includes an antibody in situ within a recombinant cell. Isolated antibodies are antibodies that have been subjected to at least one purification or isolation step. According to certain embodiments, an isolated antibody or purified antibody can be substantially free of other cellular material and/or chemicals.

[0291] The antibodies disclosed herein can comprise one or more amino acid substitutions, insertions and/or deletions in the framework and/or CDR regions of the heavy and light chain variable domains as compared to the corresponding germline sequences from which the antibodies were derived. Such mutations can be readily ascertained by comparing the amino acid sequences disclosed herein to germline sequences available from, for example, public antibody sequence databases. The present description includes antibodies, and antigen-binding fragments thereof, which are derived from any of the amino acid sequences disclosed herein, wherein one or more amino acids within one or more framework and/or CDR regions are mutated to the corresponding residue(s) of the germline sequence from which the antibody was derived, or to the corresponding residue(s) of another human germline sequence, or to a conservative amino acid substitution of the corresponding germline residue(s) (such sequence changes are referred to herein collectively as “germline mutations”). A person of ordinary skill in the art, starting with the heavy and light chain variable region sequences disclosed herein, can easily produce numerous antibodies and antigen-binding fragments which comprise one or more individual germline mutations or combinations thereof. In certain embodiments, all of the framework and/or CDR residues within the VH and/or VL domains are mutated back to the residues found in the original germline sequence from which the antibody was derived. In other embodiments, only certain residues are mutated back to the original germline sequence, e.g., only the mutated residues found within the first 8 amino acids of FR1 or within the last 8 amino acids of FR4, or only the mutated residues found within CDR1, CDR2 or CDR3. In other embodiments, one or more of the framework and/or CDR residue(s) are mutated to the corresponding residue(s) of a different germline sequence (i.e., a germline sequence that is different from the germline sequence from which the antibody was originally derived).

[0292] Furthermore, the antibodies of the present description can contain any combination of two or more germline mutations within the framework and/or CDR regions, e.g., wherein certain individual residues are mutated to the corresponding residue of a particular germline sequence while certain other residues that differ from the original germline sequence are maintained or are mutated to the corresponding residue of a different germline sequence. Once obtained, antibodies and antigen-binding fragments that contain one or more germline mutations can be easily tested for one or more desired property such as, improved binding specificity, increased binding affinity, improved or enhanced antagonistic or agonistic biological properties (as the case may be), reduced immunogenicity, improved drug-to-antibody ratio (DAR) for antibody-drug conjugates, etc. Antibodies and antigen-binding fragments obtained in this general manner are encompassed within the present description.

[0293] The term “aglycosylated antibody” refers to an antibody that does not comprise a glycosylation sequence that might interfere with a transglutamination reaction, for instance an antibody that does not have saccharide group at N297 on one or more heavy chains. In particular embodiments, an antibody heavy chain has an N297 mutation. In other words, the antibody is mutated to no longer have an asparagine residue at position 297 according to the EU numbering system as disclosed by Kabat et al. In particular embodiments, an antibody heavy chain has an N297Q or an N297D mutation. Such an antibody can be prepared by site-directed mutagenesis to remove or disable a glycosylation sequence or by site-directed mutagenesis to insert a glutamine residue at site apart from any interfering glycosylation site or any other interfering structure. Such an antibody also can be isolated from natural or artificial sources. Aglycosylated antibodies also include antibodies comprising a T299 or S298P or other mutations, or combinations of mutations that result in a lack of glycosylation.

[0294] The term “deglycosylated antibody” refers to an antibody in which a saccharide group at is removed to facilitate transglutaminase-mediated conjugation. Saccharides include, but are not limited to, N-linked oligosaccharides. In some embodiments, deglycosylation is performed at residue N297. In some embodiments, removal of saccharide groups is accomplished enzymatically, included but not limited to via PNGase.

[0295] The term “epitope” refers to an antigenic determinant that interacts with a specific antigen binding site in the variable region of an antibody molecule known as a paratope. A single antigen can have more than one epitope. Thus, different antibodies can bind to different areas on an antigen and can have different biological effects. Epitopes can be either conformational or linear. A conformational epitope is produced by spatially juxtaposed amino acids from different segments of the linear polypeptide chain. A linear epitope is one produced by adjacent amino acid residues in a polypeptide chain. In certain circumstance, an epitope can include moieties of saccharides, phosphoryl groups, or sulfonyl groups on the antigen.

[0296] The terms “conjugated protein” or “conjugated antibody” as used herein refers to a protein or an antibody covalently linked to one or more chemical moieties. The chemical moiety can include an amine compound of the present disclosure. Linkers (L) and payloads (D) suitable for use with the present disclosure are described in detail herein. In particular embodiments, a conjugated antibody comprising a therapeutic moiety is an antibody-drug conjugate (ADC), also referred to as an antibody-payload conjugate, or an antibody-linker-payload conjugate.

[0297] The term “Drug-to-Antibody Ratio” or (DAR) is the average number of therapeutic moieties, e.g., drugs, conjugated to a binding agent of the present disclosure.

[0298] The term “Linker Antibody Ratio” or (LAR), also denoted as the lower case I in some embodiments, is the average number of reactive primary amine compounds conjugated to a binding agent of the present disclosure. Such binding agents, e.g., antibodies, can be conjugated with primary amine compounds comprising, e.g., a suitable azide or alkyne. The resulting binding agent, which is functionalized with an azide or an alkyne can subsequently react with a therapeutic moiety comprising the corresponding azide or alkyne via the 1,3-cycloaddition reaction.

[0299] The phrase “pharmaceutically acceptable amount” refers to an amount effective or sufficient in treating, reducing, alleviating, or modulating the effects or symptoms of at least one health problem in a subject in need thereof. For example, a pharmaceutically acceptable amount of an antibody or antibody-drug conjugate is an amount effective for modulating a biological target using the antibody or antibody-drug-conjugates provided herein. Suitable pharmaceutically acceptable amounts include, but are not limited to, from about 0.001% up to about 10%, and any amount in between, such as about 0.01%, about 0.02%, about 0.03%, about 0.04%, about 0.05%, about 0.06%, about 0.07%, about 0.08%, about 0.09%, about 0.1%, about 0.2%, about 0.3%, about 0.4%, about 0.5%, about 0.6%, about 0.7%, about 0.8%, about 0.9%, about 1%, about 2%, about 3%, about 4%, about 5%, about 6%, about 7%, about 8%, about 9%, or about 10% of an antibody or antibody-drug-conjugate provided herein.

[0300] The phrase “reaction pH” refers to the pH of a reaction after all reaction components or reactants have been added.

[0301] The term “substantial identity” or “substantially identical,” when referring to a nucleic acid or fragment thereof, indicates that, when optimally aligned with appropriate nucleotide insertions or deletions with another nucleic acid (or its complementary strand), there is nucleotide sequence identity in at least about 95%, and more preferably at least about 96%, 97%, 98% or 99% of the nucleotide bases, as measured by any well-known algorithm of sequence identity, such as FASTA, BLAST or gap, as discussed below. A nucleic acid molecule having substantial identity to a reference nucleic acid molecule can, in certain instances, encode a polypeptide having the same or substantially similar amino acid sequence as the polypeptide encoded by the reference nucleic acid molecule.

[0302] As applied to polypeptides, the term “substantial similarity” or “substantially similar” means that two peptide sequences, when optimally aligned, such as by the programs gAP or BESTFIT using default gap weights, share at least 95% sequence identity, even more preferably at least 98% or 99% sequence identity. Preferably, residue positions which are not identical differ by conservative amino acid substitutions. A “conservative amino acid substitution” is one in which an amino acid residue is substituted by another amino acid residue having a side chain (R group) with similar chemical properties (e.g., charge or hydrophobicity). In general, a conservative amino acid substitution will not substantially change the functional properties of a protein. In cases where two or more amino acid sequences differ from each other by conservative substitutions, the percent sequence identity or degree of similarity can be adjusted upwards to correct for the conservative nature of the substitution. Means for making this adjustment are well-known to those of skill in the art. See, e.g., Pearson (1994) Methods Mol. Biol. 24: 307-331. Examples of groups of amino acids that have side chains with similar chemical properties include (1) aliphatic side chains: glycine, alanine, valine, leucine and isoleucine; (2) aliphatic-hydroxyl side chains: serine and threonine; (3) amide-containing side chains: asparagine and glutamine; (4) aromatic side chains: phenylalanine, tyrosine, and tryptophan; (5) basic side chains: lysine, arginine, and histidine; (6) acidic side chains: aspartate and glutamate, and (7) sulfur-containing side chains are cysteine and methionine. In some embodiments, conservative amino acids substitution groups are: valine-leucine-isoleucine, phenylalanine-tyrosine, lysine-arginine, alanine-valine, glutamate-aspartate, and asparagine-glutamine.

[0303] Alternatively, a conservative replacement is any change having a positive value in the PAM250 log-likelihood matrix disclosed in Gonnet et al. (1992) Science 256: 1443-1445. A “moderately conservative” replacement is any change having a nonnegative value in the PAM250 log-likelihood matrix.

[0304] Sequence similarity for polypeptides, which is also referred to as sequence identity, is typically measured using sequence analysis software. Protein analysis software matches similar sequences using measures of similarity assigned to various substitutions, deletions and other modifications, including conservative amino acid substitutions. For instance, gCG software contains programs such as gap and Bestfit which can be used with default parameters to determine sequence homology or sequence identity between closely related polypeptides, such as homologous polypeptides from different species of organisms or between a wild type protein and a mutein thereof. See, e.g., gCG Version 6.1. Polypeptide sequences also can be compared using FASTA using default or recommended parameters, a program in gCG Version 6.1. FASTA (e.g., FASTA2 and FASTA3) provides alignments and percent sequence identity of the regions of the best overlap between the query and search sequences (Pearson (2000) supra). Another particular algorithm when comparing a sequence of the description to a database containing a large number of sequences from different organisms is the computer program BLAST, especially BLASTP or TBLASTN, using default parameters. See, e.g., Altschul et al. (1990) J. Mol. Biol. 215:403-410 and Altschul et al. (1997) Nucleic Acids Res. 25:3389-402.

### Protein-Drug Conjugate Compounds

[0305] According to the foregoing objective and others, the present disclosure provides protein-drug conjugate compounds, e.g., antibody-drug conjugate compounds, and precursors and intermediates thereof, pharmaceutical compositions, and methods for treating certain diseases in a subject in need of such treatment. According to the disclosure, the protein-drug conjugate compounds provided herein comprise a glutaminyl-modified binding agent conjugated with a primary amine compound linked to a therapeutic moiety, e.g., camptothecin analog moiety, as described herein.

[0306] In one aspect, the present disclosure provides compounds comprising a binding agent according to the present disclosure, (e.g., an antibody or a fragment thereof), having one or more glutamine residues conjugated to one or more camptothecin analogs, e.g., Dxd, via an optional first linker, a branching unit comprising at least one adduct, and an optional second linker. Illustrative non-limiting examples include Formula (I) and Formula (II) described herein. In specific embodiments of a protein-drug conjugate according to the disclosure, wherein the binding agent is an antibody, (e.g., a monoclonal antibody), the term “antibody drug conjugate” or ADC is optionally used.

[0307] In one aspect, the present disclosure provides a compound having a structure according to Formula (C):

[chemical structure]

wherein BA is an antibody or an antigen-binding fragment thereof; Gln is a glutamine residue; L1 is absent or a first linker; B is a branching unit comprising at least one adduct of group B′ and group B″, where the group B′ is a first component, e.g., a first cycloaddition component; L2 is a second linker covalently attached to the branching unit B via the at least one group B″, wherein B″ is a second component, e.g., a second cycloaddition component, and wherein the group B′ and the group B″ form the at least one adduct; M is absent or a moiety having the structure

[chemical structure]

where R, R′, and R″ are independently at each occurrence hydrogen or a C₁-C₂₀ alkyl, or wherein R′ and R″ together form a ring; Camp is a camptothecin analog, and m and n are independently an integer from 1 to 30.

[0308] In one aspect, the present disclosure provides a compound having a structure according to Formula (A):

[chemical structure]

wherein:
[0309] BA is an antibody or an antigen-binding fragment thereof;
[0310] Gln is a glutamine residue;
[0311] L1 is absent or a first linker;
[0312] B is a branching unit comprising at least one adduct of group B′ and group B″, wherein one of the groups B′ and B″ is selected from —N₃ and

[chemical structure]

and the other of the groups B′ and B″ is selected from

[chemical structure]

where Q is C or N;
[0313] L2 is a second linker covalently attached to the branching unit B via the at least one group B″;
[0314] M is absent or a moiety having the structure

[chemical structure]

where R, R′, and R″ are independently at each occurrence hydrogen or a C₁-C₄ alkyl, or wherein R′ and R″ together form a 5-membered or a 6-membered ring;
[0315] Dxd is an anti-tumor agent having a structure according to Formula (P):

[chemical structure]

[0316] k is an integer from 1 to 12;
[0317] m is an integer from 1 to 30, and
[0318] n is an integer from 1 to 30

[0319] In one aspect, the present disclosure provides a compound having a structure according to Formula (I):

[chemical structure]

wherein BA is an antibody or an antigen-binding fragment thereof; Gln is a glutamine residue; L1 is absent or a first linker; B is a branching unit comprising at least one adduct of group B′, where the group B′ is selected from —N₃,

[chemical structure]

where Q is C or N; L2 is a second linker covalently attached to the branching unit B via at least one group B″, wherein the group B′ and the group B″ form the at least one adduct; M is absent or a moiety having the structure

[chemical structure]

where R, R′, and R″ are independently at each occurrences hydrogen or a C₁-C₄ alkyl, or wherein R′ and R″ together form a 5-membered or a 6-membered ring; Dxd is an anti-tumor agent having a structure according to Formula (P):

[chemical structure]

and k and n are independently an integer from 1 to 30.

### Linker L1

[0320] In certain embodiments, linker L1 is absent.

[0321] In certain embodiments, linker L1 is present and is covalently attached to the amine of a glutamine residue of the binding agent BA.

[0322] In certain embodiments, linker L1 comprises an alkyl (e.g., a C₁₋₂₀ alkyl, or a C₁₋₁₂ alkyl, or a C₁₋₆ alkyl), —NH—, —C(O)—, —(CH₂)ᵤ—NH—C(O)—, —(CH₂)ᵤ—C(O)—NH—, —(CH₂—CH₂—O)ᵥ—, —(CH₂)ᵤ—(O—CH₂—CH₂)ᵥ—C(O)—NH—, a peptide unit comprising from 2 to 4 amino acids, or combinations thereof, each of which may be optionally substituted with one or more of —S—, —S(O₂)—, —C(O)—, —C(O₂)—; or —CO₂H, wherein subscripts u and v are independently an integer from 1 to 8.

[0323] In certain embodiments, the free (unconjugated) linker L1 comprises a primary amine for attachment to the glutamine residue via a transglutamination reaction.

[0324] In one embodiment, linker L1 comprises one or more polyethylene glycol (PEG) units. In one embodiment, L1 comprises 2, or 3, or 4, or 5, or 6, or 7, or 8, or 9, or 10 PEG units.

[0325] In one embodiment, linker L1 comprises a disulfide (—S—S-) bond.

[0326] In one embodiment, linker L1 comprises a —S(O₂)— moiety.

[0327] In one embodiment, one or more carbons on linker L1 is substituted with —CO₂H.

[0328] In one embodiment, linker L1 comprises a peptide unit comprising from 2 to 4 amino acids, or a peptide unit comprising 2 amino acids, a peptide unit comprising 3 amino acids, or a peptide unit comprising 4 amino acids.

[0329] In one embodiment, linker L1 comprises a peptide unit comprising 2 amino acids selected from glycine, valine, phenylalanine, proline, glutamic acid, and citrulline, and combinations thereof. In one particular embodiment, linker L1 comprises a valine-citrulline unit.

[0330] In one embodiment, linker L1 is selected from the group consisting of:

[chemical structure]

wherein R_{A} is a group comprising an alkyne, an azide, a tetrazine, a trans-cyclooctene, a maleimide, an amine, a ketone, an aldehyde, a carboxylic acid, an ester, a thiol, a sulfonic acid, a tosylate, a halide, a silane, a cyano group, a carbohydrate group, a biotin group, a lipid residue, and wherein subscripts x, n, p and q are independently an integer from 0 to 12, and combinations thereof.

### Branching Unit B

[0331] Branching unit B comprises at least one adduct of group B′. In certain embodiments, B comprises one adduct of group B′. In certain embodiments, B comprises two adducts of group B′. In certain embodiments, B comprises three adducts of group B′.

[0332] In certain embodiments, B comprises at least four adducts of group B′. In certain embodiments, B comprises four adducts of group B′. In certain embodiments, B comprises five adducts of group B′. In certain embodiments, B comprises six adducts of group B′.

[0333] Generally, an adduct of group B′ according to the present disclosure encompasses any moiety comprising the product of an addition reaction of group B′, independent of the synthetic steps taken to produce the moiety.

[0334] In some embodiments, the adduct of group B′ may be a product of a substituted maleimide and, e.g., a thiol, or a substituted trans-cyclooctene, e.g.:

[chemical structure]

where n is an integer from 0 to 12 and, e.g., a tetrazine.

[0335] In some embodiments, the adduct of group B′ may be the product of a 1,3-cycloaddition reaction between an azide and an alkyne moiety. Without wishing to be bound by theory, the azide-alkyne cycloaddition is a 1,3-dipolar cycloaddition between an azide and a terminal or internal alkyne to give a 1,2,3-triazole.

[0336] More specifically, an adduct of group B′ selected from —N₃,

[chemical structure]

where Q is C or N, may encompass a 1,3-cycloaddition adduct of the group B′ and the group B″ selected from —N₃,

[chemical structure]

where Q is C or N, wherein the group B″ is complementary to the group B′ to form a 1,3-cycloaddition adduct.

[0337] By way of a non-limiting example, group B′ may be an azide (—N₃), and group B″ may be an alkyne-containing group, e.g.,

[chemical structure]

[0338] By way of another non-limiting example, group B′ may be an alkyne-containing group, e.g.,

[chemical structure]

and group B″ may be an azide.

[0339] In one embodiment, the adduct of the group B′ and the group B″ comprises a triazole moiety. In one particular embodiment, the adduct of the group B′ and the group B″ has a structure selected from the group consisting of:

[chemical structure]

wherein Q is C or N.

[0340] As stated above, in one embodiment, B comprises one adduct of the group B′.

[0341] In specific embodiments, L1-B is selected from the group consisting of:

[chemical structure]

where the

[chemical structure]

is the amino point of attachment to the glutamine residue of the BA, and (B′) is the adduct of the group B′.

[0342] In one embodiment, the group B′ is an azide (—N₃), and the adduct of the group B′ comprises a triazole.

[0343] According to one embodiment of the present disclosure, linkers L1-B may be azide amine linkers (AL), which comprise an amine group which directly attaches to the antibody, a PEG-containing base structure, and an azide functional group B′ (n=1).

[0344] The basic component structures of non-limiting exemplary azide amine linkers are listed shown in FIG. 3B. Specific structures synthesized as examples are provided below.

[0345] In one embodiment, B comprises at least two adducts of the group B′. In specific embodiments, B comprises:

[chemical structure]

where (B′) comprises points of attachment of the adduct of the group B′.

[0346] In specific embodiments, B is selected from the group consisting of:

[chemical structure]

[chemical structure]

[0347] In specific embodiments, L1-B is selected from the group consisting of:

[chemical structure]

[chemical structure]

where the

[chemical structure]

is the amino point of attachment to the glutamine residue of the BA.

[0348] According to another embodiment of the present disclosure, linkers L-B-1 may be branched-alkyl azide amine linkers (BL) comprising an amine group which directly attaches to the BA (e.g., an antibody), a branched-alkyl PEG containing base structure, and 2 to 6 azide functional groups B′ (n=2-6).

[0349] The basic component structures of exemplary non-limiting branched-alkyl azide amine linkers are listed in FIG. 4B. Specific structures synthesized as examples are provided below.

### Linker L2

[0350] In certain embodiments of the present disclosure, L2 has a structure according to Formula (L2):

B″-SP1-B2-(-SP2-AA-SP3)ₚ (L2), wherein:
[0351] B″ is a group capable of covalently attaching to the group B′;
[0352] SP1 is absent or a first spacer unit;
[0353] B2 is absent or a branching unit;
[0354] SP2 is absent or a second spacer unit;
[0355] AA is absent or a peptide unit comprising from 2 to 4 amino acids;
[0356] SP3 is absent or a third spacer unit, and
[0357] p is an integer from 1 to 12.

[0358] In certain embodiments of the present disclosure, L2 has a structure according to Formula (L2′):

[chemical structure]

wherein:
[0359] SP1 is absent or a first spacer unit;
[0360] B2 is absent or a branching unit;
[0361] SP2 is absent or a second spacer unit;
[0362] AA is absent or a peptide unit comprising from 2 to 4 amino acids;
[0363] SP3 is absent or a third spacer unit, and
[0364] p is an integer from 1 to 12.

[0365] In certain embodiments of the present disclosure, L2 has a structure according to Formula (L2″):

[chemical structure]

wherein:
[0366] SP1 is absent or a first spacer unit;
[0367] B2 is absent or a branching unit;
[0368] SP2 is absent or a second spacer unit;
[0369] AA is absent or a peptide unit comprising from 2 to 4 amino acids;
[0370] SP3 is absent or a third spacer unit, and
[0371] p is an integer from 1 to 12.

[0372] In some embodiments, the linker L2 comprises a group B″ capable of covalently attaching to the group B′ as described above.

[0373] In certain embodiments, the group B″ is selected from —N₃,

[chemical structure]

where Q is C or N.

[0374] By way of a non-limiting example, the group B″ may be an alkyne-containing group, e.g.,

[chemical structure]

[0375] By way of another non-limiting example, group B″ may be an azide.

[0376] In one embodiment, the adduct of the group B′ and the group B″ comprises a triazole moiety. In one particular embodiment, the adduct of the group B′ and the group B″ has a structure selected from the group consisting of:

[chemical structure]

wherein Q is C or N, or a regioisomer thereof.

[0377] In one embodiment, the first spacer SP1 is absent.

[0378] In another embodiment, SP1 is selected from the group consisting of

[chemical structure]

[0379] In one embodiment, the branching unit B2 is absent.

[0380] In one embodiment, the branching unit B2 according to the disclosure has the structure of one of B1-B5 depicted below.

| Branching | |
|---|---|
| Unit B2 | Structure |
| B1 | [chemical structure] |
| B2 | [chemical structure] |
| B3 | [chemical structure] |
| B4 | [chemical structure] |
| B5 | [chemical structure] |

[0381] In one embodiment, the second spacer SP2 is absent.

[0382] In another embodiment, SP2 is selected from the group consisting of an alkyl (e.g., a C₁₋₂₀ alkyl, or a C₁₋₁₂ alkyl, or a C₁₋₁₀ alkyl, or a C₁₋₈ alkyl, or a C₁₋₆ alkyl), —(CH₂—CH₂—O)ᵥ—, —NH—, —C(O)—, —NH—C(O)—, —NH—(CH₂)ᵤ—, —NH—(CH₂)ᵥ—C(O)—, —NH—(CH₂—CH₂—O)ᵥ—, —NH—(CH₂—CH₂—O)ᵥ—C(O)—, —NH—(CH₂—CH₂—O)ᵥ—(CH₂)ᵤ—, —NH—(CH₂—CH₂—O)ᵥ—(CH₂)ᵥ—C(O)—, —(CH₂)ᵤ—NH—C(O)—, —NH—(CH₂)ᵤ—NH—C(O)—, —NH—(CH₂)ᵥ—C(O)—NH—, or combinations thereof; wherein subscripts u and v are independently an integer from 1 to 8.

[0383] In certain embodiments, AA is a peptide unit comprising from 2 to 4 amino acids selected from glycine, valine, phenylalanine, proline, glutamic acid, lysine, phenylalanine, and citrulline, and combinations thereof.

[0384] In one embodiment, AA is a peptide unit comprising 2 amino acids. In one embodiment, AA is a peptide unit comprising 3 amino acids. In one embodiment, AA is a peptide unit comprising 4 amino acids.

[0385] In one particular embodiment, AA is valine-citrulline, valine-alanine, or phenylalanine-lysine.

[0386] In another particular embodiment, AA is selected from the group consisting of glycine-glycine-glycine (GGG), glycine-glycine-glycine-glycine (GGGG (SEQ ID NO: 2113)), glycine-glycine-phenylalanine (GGF), and glycine-glycine-phenylalanine-glycine (GGFG (SEQ ID NO: 2114)) and glutamic acid-valine-citrulline (EVC).

[0387] In one embodiment, the third spacer SP3 is absent.

[0388] In another embodiment, SP3 is selected from the group consisting of

[chemical structure]

and combinations thereof, wherein R_{c} is independently at each occurrence absent or a group selected from

[chemical structure]

[0389] In one embodiment, the spacer SP3 is covalently attached to the camptothecin analog, e.g., Dxd or M-Dxd.

[0390] In one embodiment, the linker L2 comprises from about 1 to about 12, or from about 1 to about 10, or from about 1 to about 8, or from about 1 to about 6, or from about 1 to about 4, or from about 1 to about 2 (SP2-AA-SP3) moieties, and the linker-payload L2-Dxd comprises from about 1 to about 12, or from about 1 to about 10, or from about 1 to about 8, or from about 1 to about 6, or from about 1 to about 4, or from about 1 to about 2 Dxd payload molecules.

### Moiety M

[0391] In certain embodiments, moiety M is absent.

[0392] In certain embodiments, M is present and has a structure

[chemical structure]

where R, R′, and R″ are independently at each occurrence hydrogen or alkyl, or wherein R′ and R″ together form a ring, e.g., a 3-membered to an 8-membered ring.

[0393] In certain embodiments, M is present and has a structure,

[chemical structure]

where R, R′, and R″ are independently at each occurrence hydrogen or a C₁-C₄ alkyl, or wherein R′ and R″ together form a 5-membered or a 6-membered ring.

[0394] In one embodiment, R is a hydrogen.

[0395] In one embodiment, R′ is a hydrogen. In one embodiment, R′ is a C₁-C₄ alkyl.

[0396] In one embodiment, R″ is a hydrogen. In one embodiment, R″ is a C₁-C₄ alkyl.

[0397] In one embodiment, R′ and R″ together form a 5-membered ring. In one embodiment, R′ and R″ together are —(OH₂)₃—.

[0398] In one embodiment, R′ and R″ together form a 6-membered ring. In one embodiment, R′ and R″ together are —(CH₂)₄—.

[0399] In one embodiment, R, R′, and R″ are hydrogens at each occurrence, i.e. M is

[chemical structure]

[0400] In another embodiment, R is hydrogen and R′ and R″ together form a 5-membered ring, e.g., R′ and R″ together are —(CH₂)₃— and M is

[chemical structure]

### Payloads

[0401] In certain embodiments, the payloads of the present disclosure are camptothecin analogs and/or derivatives.

[chemical structure]

[0402] Camptothecin (CPT), shown above, is a topoisomerase poison. It was discovered in 1966 by M. E. Wall and M. C. Wani in systematic screening of natural products for anticancer drugs. It was isolated from the bark and stem of Camptotheca acuminata (Camptotheca, Happy tree), a tree native to China used as a cancer treatment in Traditional Chinese Medicine. Camptothecin showed remarkable anticancer activity in preliminary clinical trials. However, it has low solubility, so synthetic and medicinal chemists have developed numerous syntheses of camptothecin and various derivatives to increase the benefits of the chemical, with good results. Four camptothecin analogs have been approved and are used in cancer chemotherapy today: topotecan, irinotecan, belotecan, and deruxtecan (Dxd).

[0403] Trastuzumab deruxtecan (T-Dxd) is an antibody-drug conjugate that includes a human epidermal growth factor receptor 2 (HER2)-directed antibody trastuzumab and a topoisomerase I inhibitor conjugate deruxtecan (Dxd, a derivative of exatecan). It was approved for use in the United States in December 2019. Exatecan, shown below, is a camptothecin analog.

[chemical structure]

[0404] In one embodiment, the payload of the present disclosure is deruxtecan (Dxd).

[0405] In certain embodiments, the payload of the present disclosure is a compound having the structure P-I:

[chemical structure]

wherein R₁, R₂, and R₃, and R₄ are independently a hydrogen or an alkyl, e.g., a C₁-C₁₂ alkyl, or a C₁-C₈ alkyl, or a C₁-C₆ alkyl, or a C₁-C₄ alkyl, or wherein R₂ and R₃ together form a 5-membered or a 6-membered ring,
or a pharmaceutically acceptable salt thereof.

[0406] In one embodiment, R₁ is a hydrogen.

[0407] In one embodiment, R₂ is a hydrogen. In one embodiment, R₂ is a C₁-C₄ alkyl.

[0408] In one embodiment, R₃ is a hydrogen. In one embodiment, R₃ is a C₁-C₄ alkyl.

[0409] In one embodiment, R₄ is a hydrogen. In one embodiment, R₄ is a C₁-C₄ alkyl.

[0410] In one embodiment, R₁, R₂, and R₃, and R₄ are a hydrogen in each occurrence. In one embodiment, the compound of the present disclosure is

[chemical structure]

or a pharmaceutically acceptable salt thereof.

[0411] In one embodiment, R₂ and R₃ together form a 5-membered ring. In one embodiment, R₂ and R₃ together are —(CH₂)₃-.

[0412] In one embodiment, R₂ and R₃ together form a 6-membered ring. In one embodiment, R₂ and R₃ together are —(CH₂)₄—.

[0413] In one embodiment, R₁ is a hydrogen, and R₂ and R₃ together form a 5-membered ring.

[0414] In one embodiment, the compound of the present disclosure has a structure according to Formula (P-II):

[chemical structure]

wherein R is a hydrogen or an alkyl, e.g., a C₁-C₁₂ alkyl, or a C₁-C₈ alkyl, or a C₁-C₆ alkyl, or a C₁-C₄ alkyl,
or a pharmaceutically acceptable salt thereof.

[0415] It should be understood by one of skill in the art that the compound P-II depicted above is also meant to include all isomeric (e.g., enantiomeric, diastereomeric, and geometric (or conformational)) forms of the structure. For example, the R and S configurations for each asymmetric center, are within the scope of the present disclosure. By way of an example, the two isomers depicted below are within the scope of the present disclosure:

[chemical structure]

[0416] In one embodiment, the compound of the present disclosure is

[chemical structure]

or a pharmaceutically acceptable salt thereof.

[0417] In one embodiment, the payload according to the disclosure is conjugated to form a protein-drug conjugate (e.g., an antibody-drug conjugate). In one embodiment, the payload is covalently attached to a moiety M. In one embodiment, the payload is M-Dxd. In one embodiment, M-Dxd has a structure selected from the group consisting of

[chemical structure]

wherein R is a hydrogen or a C₁-C₄ alkyl, and where [symbol] represents the point of attachment to L2.

[0418] The present disclosure also relates to a pharmaceutical composition comprising a therapeutically effective amount of the compound as described above or a pharmaceutically acceptable salt thereof and one or more pharmaceutically acceptable carriers, diluents, or excipients.

[0419] In one embodiment, the compound according to the disclosure has the following structure:

[chemical structure]

wherein BA is a binding agent (e.g., an antibody or an antigen-binding fragment thereof).

[0420] In one embodiment, the compound according to the disclosure has the following structure:

[chemical structure]

wherein BA is a binding agent (e.g., an antibody or an antigen-binding fragment thereof).

[0421] In one embodiment, the compound according to the disclosure has the following structure:

[chemical structure]

wherein BA is a binding agent (e.g., an antibody or an antigen-binding fragment thereof).

[0422] In one embodiment, the compound according to the disclosure has the following structure:

[chemical structure]

wherein BA is a binding agent (e.g., an antibody or an antigen-binding fragment thereof).

[0423] The present disclosure also relates to a pharmaceutical composition comprising a therapeutically effective amount of the compound as described above or a pharmaceutically acceptable salt thereof and one or more pharmaceutically acceptable carriers, diluents, or excipients.

### Linker-Payloads (L2-P)

[0424] In another aspect, the present disclosure provides a compound according to Formula (L2-P):

B″-SP1-B2-(-SP2-AA-SP3-M-Dxd)p (L2-P),wherein:
[0425] B″ is selected from the group consisting of —N₃,

[chemical structure]

[0426] SP1 is absent or a first spacer unit selected from the group consisting of

[chemical structure]

[0427] B2 is absent or a branching unit;
[0428] SP2 is absent or a second spacer unit selected from the group consisting of a C₁₋₆ alkyl, —(CH₂—CH₂—O)ᵥ—, —NH—, —C(O)—, —NH—C(O)—, —NH—(CH₂)ᵤ—, —NH—(CH₂)ᵥ—C(O)—, —NH—(CH₂—CH₂—O)ᵥ—, —NH—(CH₂—CH₂—O)ᵥ—C(O)—, —NH—(CH₂—CH₂—O)ᵥ—(CH₂)ᵤ—, —NH—(CH₂—CH₂—O)ᵥ—(CH₂)˜-C(O)—, —(CH₂)ᵤ—NH—C(O)—, —NH—(CH₂)ᵤ—NH—C(O)—, —NH—(CH₂)ᵤ—C(O)—NH—, or combinations thereof; wherein subscripts
[0429] u and v are independently an integer from 1 to 8;
[0430] AA is absent or a peptide unit comprising from 2 to 4 amino acids;
[0431] SP3 is absent or a third spacer unit selected from the group consisting of,

[chemical structure]

wherein R_{c} is independently at each occurrence absent or a group selected from OH and

[chemical structure]

[0432] M is absent or

[chemical structure]

where R, R′, and R″ are independently at each occurrence hydrogen or a C₁-C₄ alkyl, or wherein R′ and R″ together form a 5-membered or a 6-membered ring; and
[0433] Dxd is an anti-tumor agent having a structure according to Formula (P):

[chemical structure]

and
[0434] p is an integer from 1 to 12.

[0435] In another aspect, the present disclosure provides a compound according to Formula (L2′-P):

[chemical structure]

wherein:
[0436] B″ is selected from the group consisting of —N₃,

[chemical structure]

[0437] SP1 is absent or a first spacer unit selected from the group consisting of

[chemical structure]

[0438] B2 is absent or a branching unit;
[0439] SP2 is absent or a second spacer unit selected from the group consisting of a C₁₋₆ alkyl, —(CH₂—CH₂—O)ᵥ—, —NH—, —C(O)—, —NH—C(O)—, —NH—(CH₂)ᵤ—, —NH—(CH₂)ᵥ—C(O)—, —NH—(CH₂—CH₂—O)ᵥ—, —NH—(CH₂—CH₂—O)ᵥ—C(O)—, —NH—(CH₂—CH₂—O)ᵥ—(CH₂)ᵤ—, —NH—(CH₂—CH₂—O)ᵥ—(CH₂)ᵥ—C(O)—, —(CH₂)ᵤ—NH—C(O)—, —NH—(CH₂)ᵤ—NH—C(O)—, —NH—(CH₂)ᵤ—C(O)—NH—, or combinations thereof; wherein subscripts
[0440] u and v are independently an integer from 1 to 8;
[0441] AA is absent or a peptide unit comprising from 2 to 4 amino acids;
[0442] SP3 is absent or a third spacer unit selected from the group consisting of,

[chemical structure]

wherein R_{c} is independently at each occurrence absent or a group selected from OH and

[chemical structure]

[0443] M is absent or

[chemical structure]

where R, R′, and R″ are independently at each occurrence hydrogen or a C₁-C₄ alkyl, or wherein R′ and R″ together form a 5-membered or a 6-membered ring; and
[0444] Dxd is an anti-tumor agent having a structure according to Formula (P):

[chemical structure]

[0445] p is an integer from 1 to 12.

[0446] In another aspect, the present disclosure provides a compound according to Formula (L2″-P):

Maleimide-N-SP1-B2-(-SP2-AA-SP3-M-Dxd)p (L2″-P),

wherein:
[0447] B″ is selected from the group consisting of —N₃,

[chemical structure]

[0448] SP1 is absent or a first spacer unit selected from the group consisting of

[chemical structure]

[0449] B2 is absent or a branching unit;
[0450] SP2 is absent or a second spacer unit selected from the group consisting of a C₁₋₆ alkyl, —(CH₂—CH₂—O)ᵥ—, —NH—, —C(O)—, —NH—C(O)—, —NH—(CH₂)ᵤ—, —NH—(CH₂)ᵥ—C(O)—, —NH—(CH₂—CH₂—O)ᵥ—, —NH—(CH₂—CH₂—O)ᵥ—C(O)—, —NH—(CH₂—CH₂—O)ᵥ—(CH₂)ᵤ—, —NH—(CH₂—CH₂—O)ᵥ—(CH₂)˜-C(O)—, —(CH₂)ᵤ—NH—C(O)—, —NH—(CH₂)ᵤ—NH—C(O)—, —NH—(CH₂)ᵤ—C(O)—NH—, or combinations thereof; wherein subscripts
[0451] u and v are independently an integer from 1 to 8;
[0452] AA is absent or a peptide unit comprising from 2 to 4 amino acids;
[0453] SP3 is absent or a third spacer unit selected from the group consisting of,

[chemical structure]

wherein R_{c} is independently at each occurrence absent or a group selected from OH and

[chemical structure]

[0454] M is absent or

[chemical structure]

where R, R′, and R″ are independently at each occurrence hydrogen or a C₁-C₄ alkyl, or wherein R′ and R″ together form a 5-membered or a 6-membered ring; and
[0455] Dxd is an anti-tumor agent having a structure according to Formula (P):

[chemical structure]

and
[0456] p is an integer from 1 to 12.

[0457] In certain embodiments, the linker-payload L2-P, L2′-P, L2″-P according to the disclosure has a structure selected from the group consisting of:

[chemical structure]

[chemical structure]

[chemical structure]

[chemical structure]

[chemical structure]

or a pharmaceutically acceptable salt thereof.

### Branched Linker2-Payloads (BL2P)

[0458] In another aspect, the present disclosure provides L2-P which comprise one or more branching units. Exemplary branching units B1-B5 according to the disclosure are depicted below.

| Branch B | Structure |
|---|---|
| B1 | [chemical structure] |
| B2 | [chemical structure] |
| B3 | [chemical structure] |
| B4 | [chemical structure] |
| B5 | [chemical structure] |

[0459] Structures for exemplary branched linker2-payloads (BL2P) according to the disclosure are provided below.

Structures

[chemical structure]

[chemical structure]

[chemical structure]

[chemical structure]

[chemical structure]

[chemical structure]

[chemical structure]

[chemical structure]

[chemical structure]

[chemical structure]

[chemical structure]

[chemical structure]

[chemical structure]

[chemical structure]

[chemical structure]

[chemical structure]

[chemical structure]

[chemical structure]

[chemical structure]

[chemical structure]

[0460] In one embodiment, the compound (i.e., the linker-payload) according to the disclosure has the structure:

[chemical structure]

or a pharmaceutically acceptable salt thereof.

[0461] In one embodiment, the compound (i.e., the linker-payload) according to the disclosure has the structure:

[chemical structure]

or a pharmaceutically acceptable salt thereof.

[0462] In another aspect, the present disclosure provides an antibody-drug conjugate according to Formula (II):

[chemical structure]

wherein Ab is an antibody; Gln is a glutamine residue; L1 is absent or a first linker as described above; B is a branching unit as described above comprising at least one adduct of group B′ and group B″, where the group B′ is selected from —N₃,

[chemical structure]

and at least one group B″, wherein B″-SP1-B2-(-SP2-AA-SP3-M-Dxd)p is the compound according to formula (L2-P) as described above, and wherein the compound of formula (L2-P) is covalently attached to the antibody via the adduct of the group B′ and the group B″, k is an integer from 1 to 12, and p and n are independently an integer from 1 to 30.

[0463] In one embodiment, the antibody-drug conjugate according to the present disclosure comprises an antibody and a linker-payload, wherein the linker-payload comprises the structure:

[chemical structure]

or a pharmaceutically acceptable salt thereof, where [symbol] represents the point of attachment to the binding agent (e.g., an antibody), directly or through a second linker.

### Binding Agents

[0464] In one embodiment, the effectiveness of the protein-drug conjugate embodiments described herein depend on the selectivity of the binding agent to bind its binding partner. In one embodiment of the present disclosure, the binding agent is any molecule capable of binding with some specificity to a given binding partner. In one embodiment, the binding agent is within a mammal where the interaction can result in a therapeutic use. In an alternative embodiment, the binding agent is in vitro where the interaction can result in a diagnostic use. In some aspects, the binding agent is capable of binding to a cell or cell population.

[0465] Suitable binding agents of the present disclosure include proteins that bind to a binding partner, wherein the binding agent comprises one or more glutamine residues. Suitable binding agents include, but are not limited to, antibodies, lymphokines, hormones, growth factors, viral receptors, interleukins, or any other cell binding or peptide binding molecules or substances.

[0466] In one embodiment the binding agent is an antibody. In certain embodiments, the antibody is selected from monoclonal antibodies, polyclonal antibodies, antibody fragments (Fab, Fab′, and F(ab)2, minibodies, diabodies, triabodies, and the like). Antibodies herein can be humanized using methods described in U.S. Pat. No. 6,596,541 and US Publication No. 2012/0096572, each incorporated by reference in their entirety. In certain embodiments of the protein-drug conjugate compounds of the present disclosure, BA is a humanized monoclonal antibody. For example, BA can be a monoclonal antibody that binds HER2, MET, or STEAP2. In certain embodiments of the protein-drug conjugate compounds of the present disclosure, BA is a bispecific antibody, e.g., an anti-HER2/HER2 bispecific antibody, or an anti-MET/MET bispecific antibody.

[0467] In the present disclosure, the antibody can be any antibody deemed suitable to the practitioner of skill. In some embodiments, the antibody comprises at least one glutamine residue in at least one polypeptide chain sequence. In certain embodiments, the antibody comprises one or more gln295 residues. In certain embodiments, the antibody comprises two heavy chain polypeptides, each with one gln295 residue. In further embodiments, the antibody comprises one or more glutamine residues at a site other than a heavy chain 295. Such antibodies can be isolated from natural sources or engineered to comprise one or more glutamine residues. Techniques for engineering glutamine residues into an antibody polypeptide chain are within the skill of the practitioners in the art. In certain embodiments, the antibody is aglycosylated.

[0468] The antibody can be in any form known to those of skill in the art. In certain embodiments, the antibody comprises a light chain. In certain embodiments, the light chain is a kappa light chain. In certain embodiments, the light chain is a lambda light chain.

[0469] In certain embodiments, the antibody comprises a heavy chain. In some aspects, the heavy chain is an IgA. In some aspects, the heavy chain is an IgD. In some aspects, the heavy chain is an IgE. In some aspects, the heavy chain is an IgG. In some aspects, the heavy chain is an IgM. In some aspects, the heavy chain is an IgG1. In some aspects, the heavy chain is an IgG2. In some aspects, the heavy chain is an IgG3. In some aspects, the heavy chain is an IgG4. In some aspects, the heavy chain is an IgA1. In some aspects, the heavy chain is an IgA2.

[0470] In some embodiments, the antibody is an antibody fragment. In some aspects, the antibody fragment is an Fv fragment. In some aspects, the antibody fragment is a Fab fragment. In some aspects, the antibody fragment is a F(ab′)2 fragment. In some aspects, the antibody fragment is a Fab′ fragment. In some aspects, the antibody fragment is an scFv (sFv) fragment. In some aspects, the antibody fragment is an scFv-Fc fragment.

[0471] In some embodiments, the antibody is a monoclonal antibody. In some embodiments, the antibody is a polyclonal antibody.

[0472] In some embodiments, the antibody is a chimeric antibody. In some embodiments, the antibody is a humanized antibody. In some embodiments, the antibody is a human antibody.

[0473] The antibody can have binding specificity for any antigen deemed suitable to those of skill in the art. In certain embodiments, the antigen is a transmembrane molecule (e.g., receptor) or a growth factor. Exemplary antigens include, but are not limited to, molecules such as renin; a growth hormone, including human growth hormone and bovine growth hormone; growth hormone releasing factor; parathyroid hormone; thyroid stimulating hormone; lipoproteins; alpha1-antitrypsin; insulin A-chain; insulin B-chain; proinsulin; follicle stimulating hormone; calcitonin; luteinizing hormone; glucagon; clotting factors such as factor vmc, factor IX, tissue factor (TF), and von Willebrands factor; anti-clotting factors such as Protein C; atrial natriuretic factor; lung surfactant; a plasminogen activator, such as urokinase or human urine or tissue-type plasminogen activator (t-PA); bombesin; thrombin; hemopoietic growth factor; tumor necrosis factor-alpha and -beta; enkephalinase; RANTES (regulated on activation normally T-cell expressed and secreted); human macrophage inflammatory protein (MIP-1-alpha); a serum albumin, such as human serum albumin; Muellerian-inhibiting substance; relaxin A-chain; relaxin B-chain; prorelaxin; mouse gonadotropin-associated peptide; a microbial protein, such as betalactamase; DNase; 19E; a cytotoxic T-lymphocyte associated antigen (CTLA), such as CTLA-4; inhibin; activin; vascular endothelial growth factor (VEGF); receptors for hormones or growth factors; protein A or D; rheumatoid factors; a neurotrophic factor such as bone-derived neurotrophic factor (BDNF), neurotrophin-3, -4, -5, or -6 (NT-3, NT4, NT-5, or NT-6), or a nerve growth factor such as NGF-β; platelet-derived growth factor (PDGF); fibroblast growth factor such as aFGF and bFGF; fibroblast growth factor receptor 2 (FGFR2), epidermal growth factor (EGF); transforming growth factor (TGF) such as TGF-alpha and TGF-beta, including TGF-β1, TGF-β2, TGF-β3, TGF-β4, or TGF-ρ5; insulin-like growth factor-I and -2 (IGF-I and IGF-2); des(I-3)-IGF-I (brain IGF-I), insulin-like growth factor binding proteins, EpCAM, gD3, FLT3, PSMA, PSCA, MUC1, MUC16, STEAP, STEAP2, CEA, TENB2, EphA receptors, EphB receptors, folate receptor, FOLRI, mesothelin, cripto, alphavbeta6, integrins, VEGF, VEGFR, EGFR, transferrin receptor, IRTAI, IRTA2, IRTA3, IRTA4, IRTA5; CD proteins such as CD2, CD3, CD4, CD5, CD6, CD8, CDII, CD14, CD19, CD20, CD21, CD22, CD25, CD26, CD28, CD30, CD33, CD36, CD37, CD38, CD40, CD44, CD52, CD55, CD56, CD59, CD70, CD79, CD80, CD81, CD103, CD105, CD134, CD137, CD138, CD152, or an antibody which binds to one or more tumor-associated antigens or cell-surface receptors disclosed in US Publication No. 2008/0171040 or US Publication No. 2008/0305044 and incorporated in their entirety by reference; erythropoietin; osteoinductive factors; immunotoxins; a bone morphogenetic protein (BMP); an interferon, such as interferon-alpha, -beta, and -gamma; colony stimulating factors (CSFs), e.g., M-CSF, gM-CSF, and g-CSF; interleukins (ILs), e.g., IL-1 to IL-10; superoxide dismutase; T-cell receptors; surface membrane proteins; decay accelerating factor; viral antigen such as, for example, a portion of the HIV envelope; transport proteins; homing receptors; addressins; regulatory proteins; integrins, such as CDIIa, CDIIb, CDIIc, CD18, an ICAM, VLA-4 and VCAM; a tumor associated antigen such as AFP, ALK, B7H4, BAGE proteins, β-catenin, brc-abl, BRCA1, BORIS, CA9 (carbonic anhydrase IX), caspase-8, CD20, CD40, CD123, CDK4, CEA, CLEC12A, c-kit, cMET, CTLA4, cyclin-B1, CYP1B1, EGFR, EGFRVIII, endoglin, Epcam, EphA2, ErbB2/HER2, ErbB3/HER3, ErbB4/HER4, ETV6-AML, Fra-1, FOLR1, gAGE proteins (e.g., gAGE-1, -2), gD2, gD3, globoH, glypican-3, gM3, gp100, HER2, HLA/B-raf, HLA/EBNA1, HLA/k-ras, HLA/MAGE-A3, hTERT, IGF1R, LGR5, LMP2, MAGE proteins (e.g., MAGE-1, -2, -3, -4, -6, and -12), MART-1, mesothelin, mL-IAP, Muc1, Muc16 (CA-125), MET, MUM1, NA17, NGEP, NY-BR1, NY-BR62, NY-BR85, NY-ESO1, OX40, p15, p53, PAP, PAX3, PAX5, PCTA-1, PDGFR-α, PDGFR-β, PDGF-A, PDGF-B, PDGF-C, PDGF-D, PLAC1, PRLR, PRAME, PSCA, PSGR, PSMA (FOLH1), RAGE proteins, Ras, RGS5, Rho, SART-1, SART-3, STEAP1, STEAP2, STn, survivin, TAG-72, TGF-β, TMPRSS2, Tn, TNFRSF17, TRP-1, TRP-2, tyrosinase, and uroplakin-3, and fragments of any of the herein-listed polypeptides.

[0474] Exemplary antigens also include, but are not limited to, BCMA, SLAMF7, B7H4, gPNMB, UPK3A, and LGR5. Exemplary antigens also include, but are not limited to, MUC16, PSMA, STEAP2, and HER2.

[0475] In some embodiments, antigens also include, but are not limited to, hematologic targets, e.g., CD22, CD30, CD33, CD79a, and CD79b.

[0476] Some embodiments herein are target specific for therapeutic or diagnostic use. In one embodiment, binding agents are prepared to interact with and bind to antigens defined as tumor antigens, which include antigens specific for a type of tumor or antigens that are shared, overexpressed or modified on a particular type of tumor. Examples include: alpha-actinin-4 with lung cancer, ARTC1 with melanoma, BCR-ABL fusion protein with chronic myeloid leukemia, B-RAF, CLPP or Cdc27 with melanoma, CASP-8 with squamous cell carcinoma, and hsp70-2 with renal cell carcinoma as well as the following shared tumor-specific antigens, for example: BAGE-1, gAGE, gnTV, KK-LC-1, MAGE-A2, NA88-A, TRP2-INT2. In some embodiments, the antigen is PRLR or HER2. In some embodiments, the antibody binds STEAP2, MUC16, EGFR, EGFRVIII, FGR2, or PRLR.

[0477] In some embodiments, the antigens include HER2. In some embodiments, the antigens include STEAP2. In some embodiments, the antigens include MET. In some embodiments, the antigens include EGFRVIII. In some embodiments, the antigens include MUC16. In some embodiments, the antigens include PRLR. In some embodiments, the antigens include PSMA. In some embodiments, the antigens include FGFR2.

[0478] In some embodiments, the BA is an anti-HER2 antibody, an anti-STEAP2 antibody, an anti-MET antibody, an anti-EGFRVIII antibody, an anti-MUC16 antibody, an anti-PRLR antibody, an anti-PSMA antibody, or an anti-FGFR2 antibody, an anti-HER2/HER2 bispecific antibody, an anti-MET/MET bispecific antibody, or an anti-FOLR1 antibody, or an antigen-binding fragment thereof.

[0479] In some embodiments, the BA targets a cancer selected from the group consisting of breast cancer, ovarian cancer, prostate cancer, lung cancer, liver cancer, or brain cancer.

### Anti-HER2 Antibodies Suitable for Protein-Drug Conjugates

[0480] In some embodiments, the antibody is an anti HER2 antibody. In some embodiments, the antibody is trastuzumab, pertuzumab (2C₄) or margetuximab (MGAH22). In some embodiment, the antibody is trastuzumab. According to certain embodiments, protein-drug conjugates, e.g., ADCs, according to the disclosure comprise anti-HER2 antibody. In some embodiment, the anti-HER2 antibody may include those described in WO 2019/212965 A1.

[0481] In some embodiments, the antibody is an anti-HER2/HER2 bispecific antibody, which comprises a first antigen-binding domain (D1) which specifically binds a first epitope of human HER2 and a second antigen-binding domain (D2) which specifically binds a second epitope of human HER2.

[0482] In certain embodiments, D1 and D2 domains of an anti-HER2/HER2 bispecific antibody are non-competitive with one another. Non-competition between D1 and D2 for binding to HER2 means that, the respective monospecific antigen binding proteins from which D1 and D2 were derived do not compete with one another for binding to human HER2. Exemplary antigen-binding protein competition assays are known in the art.

[0483] In certain embodiments, D1 and D2 bind to different (e.g., non-overlapping, or partially overlapping) epitopes on HER2.

[0484] In one non-limiting embodiment, the present disclosure provides protein-drug conjugates comprising a bispecific antigen-binding molecule comprising:
[0485] a first antigen-binding domain (D1); and
[0486] a second antigen-binding domain (D2);
[0487] wherein D1 specifically binds a first epitope of human HER2; and
[0488] wherein D2 specifically binds a second epitope of human HER2.

[0489] Anti-HER2/HER2 bispecific antibodies may be constructed using the antigen-binding domains of two separate monospecific anti-HER2 antibodies. For example, a collection of monoclonal monospecific anti-HER2 antibodies may be produced using standard methods known in the art. The individual antibodies thus produced may be tested pairwise against one another for cross-competition to a HER2 protein. If two different anti-HER2 antibodies are able to bind to HER2 at the same time (i.e., do not compete with one another), then the antigen-binding domain from the first anti-HER2 antibody and the antigen-binding domain from the second, non-competitive anti-HER2 antibody can be engineered into a single anti-HER2/HER2 bispecific antibody in accordance with the present disclosure.

[0490] According to the present disclosure, a bispecific antigen-binding molecule can be a single multifunctional polypeptide, or it can be a multimeric complex of two or more polypeptides that are covalently or non-covalently associated with one another. As will be made evident by the present disclosure, any antigen binding construct which has the ability to simultaneously bind two separate, non-identical epitopes of the HER2 molecule is regarded as a bispecific antigen-binding molecule. Any of the bispecific antigen-binding molecules described herein, or variants thereof, may be constructed using standard molecular biological techniques (e.g., recombinant DNA and protein expression technology) as will be known to a person of ordinary skill in the art.

[0491] In another aspect, the disclosure provides a pharmaceutical composition comprising a recombinant human antibody or fragment thereof which specifically binds HER2 and a pharmaceutically acceptable carrier. In one non-limiting embodiment, the antibody may bind two separate epitopes on the HER2 protein, i.e., the antibody is a HER2/HER2 bispecific antibody. In a related aspect, the disclosure features a composition which is a combination of an anti-HER2/HER2 antibody and a second therapeutic agent. In one embodiment, the second therapeutic agent is any agent that is advantageously combined with an anti-HER2/HER2 antibody. Additional combination therapies and co-formulations involving the anti-HER2/HER2 bispecific antibodies of the present disclosure are disclosed elsewhere herein.

[0492] In another aspect, the disclosure provides therapeutic methods for targeting/killing tumor cells expressing HER2 using an anti-HER2/HER2 bispecific antibody of the disclosure, wherein the therapeutic methods comprise administering a therapeutically effective amount of a pharmaceutical composition comprising an anti-HER2/HER2 antibody of the disclosure to a subject in need thereof. In some cases, the anti-HER2/HER2 antibodies (or antigen-binding fragments thereof) can be used for treating breast cancer, or may be modified to be more cytotoxic by methods, including but not limited to, modified Fc domains to increase ADCC (see e.g., Shield et al. (2002) JBC 277:26733), radioimmunotherapy, antibody-drug conjugates, or other methods for increasing the efficiency of tumor ablation.

[0493] The present disclosure also includes the use of an anti-HER2 antibody of the disclosure in the manufacture of a medicament for the treatment of a disease or disorder (e.g., cancer) related to or caused by HER2-expressing cells. In one aspect, the disclosure relates to a compound comprising an anti-HER2 antibody or antigen-binding fragment, or a HER2/HER2 bispecific antibody, as disclosed herein, for use in medicine. In one aspect, the disclosure relates to a compound comprising an antibody-drug conjugate (ADC) as disclosed herein, for use in medicine.

[0494] In yet another aspect, the disclosure provides bispecific anti-HER2/HER2 antibodies for diagnostic applications, such as, e.g., imaging reagents.

### Anti-STEAP2 Antibodies Suitable for Protein-Drug Conjugates

[0495] In some embodiments, the antibody is an anti-six-transmembrane epithelial antigen of prostate 2 (STEAP2), i.e., an anti-STEAP2 antibody. STEAP2, which works as a shuttle between the Golgi complex and the plasma membrane, is a metalloreductase which reduces iron and copper, facilitating their import into the cell. STEAP2 is mainly localized to epithelial cells of the prostate. STEAP2 is also expressed in normal heart, brain, pancreas, ovary, skeletal muscle, mammary gland, testis, uterus, kidney, lung, trachea, colon, and liver. STEAP2 is over-expressed in cancerous tissues, including prostate, bladder, cervix, lung, colon, kidney, breast, pancreatic, stomach, uterus, and ovarian tumors (Gomes, I. M. et al., 2012, Mol. Cancer Res. 10:573-587; Challita-Eid-P. M., et al., 2003, WO 03/087306; Emtage, P. C. R., 2005, WO 2005/079490).

[0496] In one aspect, suitable anti-STEAP antibodies are those disclosed in US2018/0104357. Exemplary anti-STEAP2 antibodies according to the present disclosure are listed in Tables 1 and 2 herein. Table 1 sets forth the amino acid sequence identifiers of the heavy chain variable regions (HCVRs) and light chain variable regions (LCVRs), as well as heavy chain complementarity determining regions (HCDR1, HCDR2 and HCDR3), and light chain complementarity determining regions (LCDR1, LCDR2 and LCDR3) of the exemplary anti-STEAP2 antibodies. Table 2 sets forth the sequence identifiers of the nucleic acid molecules encoding the HCVRs, LCVRs, HCDR1, HCDR2 HCDR3, LCDR1, LCDR2 and LCDR3 of the exemplary anti-STEAP2 antibodies.

[0497] The present disclosure provides antibodies, or antigen-binding fragments thereof, comprising an HCVR comprising an amino acid sequence selected from any of the HCVR amino acid sequences listed in Table 1, or a substantially similar sequence thereof having at least 90%, at least 95%, at least 98% or at least 99% sequence identity thereto.

[0498] The present disclosure also provides antibodies, or antigen-binding fragments thereof, comprising an LCVR comprising an amino acid sequence selected from any of the LCVR amino acid sequences listed in Table 1, or a substantially similar sequence thereof having at least 90%, at least 95%, at least 98% or at least 99% sequence identity thereto.

[0499] The present disclosure also provides antibodies, or antigen-binding fragments thereof, comprising an HCVR and an LCVR amino acid sequence pair (HCVR/LCVR) comprising any of the HCVR amino acid sequences listed in Table 1 paired with any of the LCVR amino acid sequences listed in Table 1. According to certain embodiments, the present disclosure provides antibodies, or antigen-binding fragments thereof, comprising an HCVR/LCVR amino acid sequence pair contained within any of the exemplary anti-STEAP2 antibodies listed in Table 1. In certain embodiments, the HCVR/LCVR amino acid sequence pair is selected from the group consisting of SEQ ID NOs: 250/258 (e.g., H2M11162N).

[0500] The present disclosure also provides antibodies, or antigen-binding fragments thereof, comprising a heavy chain CDR1 (HCDR1) comprising an amino acid sequence selected from any of the HCDR1 amino acid sequences listed in Table 1 or a substantially similar sequence thereof having at least 90%, at least 95%, at least 98% or at least 99% sequence identity.

[0501] The present disclosure also provides antibodies, or antigen-binding fragments thereof, comprising a heavy chain CDR2 (HCDR2) comprising an amino acid sequence selected from any of the HCDR2 amino acid sequences listed in Table 1 or a substantially similar sequence thereof having at least 90%, at least 95%, at least 98% or at least 99% sequence identity.

[0502] The present disclosure also provides antibodies, or antigen-binding fragments thereof, comprising a heavy chain CDR3 (HCDR3) comprising an amino acid sequence selected from any of the HCDR3 amino acid sequences listed in Table 1 or a substantially similar sequence thereof having at least 90%, at least 95%, at least 98% or at least 99% sequence identity.

[0503] The present disclosure also provides antibodies, or antigen-binding fragments thereof, comprising a light chain CDR1 (LCDR1) comprising an amino acid sequence selected from any of the LCDR1 amino acid sequences listed in Table 1 or a substantially similar sequence thereof having at least 90%, at least 95%, at least 98% or at least 99% sequence identity.

[0504] The present disclosure also provides antibodies, or antigen-binding fragments thereof, comprising a light chain CDR2 (LCDR2) comprising an amino acid sequence selected from any of the LCDR2 amino acid sequences listed in Table 1 or a substantially similar sequence thereof having at least 90%, at least 95%, at least 98% or at least 99% sequence identity.

[0505] The present disclosure also provides antibodies, or antigen-binding fragments thereof, comprising a light chain CDR3 (LCDR3) comprising an amino acid sequence selected from any of the LCDR3 amino acid sequences listed in Table 1 or a substantially similar sequence thereof having at least 90%, at least 95%, at least 98% or at least 99% sequence identity.

[0506] The present disclosure also provides antibodies, or antigen-binding fragments thereof, comprising an HCDR3 and an LCDR3 amino acid sequence pair (HCDR3/LCDR3) comprising any of the HCDR3 amino acid sequences listed in Table 1 paired with any of the LCDR3 amino acid sequences listed in Table 1. According to certain embodiments, the present disclosure provides antibodies, or antigen-binding fragments thereof, comprising an HCDR3/LCDR3 amino acid sequence pair contained within any of the exemplary anti-STEAP2 antibodies listed in Table 1. In certain embodiments, the HCDR3/LCDR3 amino acid sequence pair is selected from the group consisting of SEQ ID NOs: 256/264 (e.g., H2M11162N).

[0507] The present disclosure also provides antibodies, or antigen-binding fragments thereof, comprising a set of six CDRs (i.e., HCDR1-HCDR2-HCDR3-LCDR1-LCDR2-LCDR3) contained within any of the exemplary anti-STEAP2 antibodies listed in Table 1. In certain embodiments, the HCDR1-HCDR2-HCDR3-LCDR1-LCDR2-LCDR3 amino acid sequences set is selected from the group consisting of SEQ ID NOs: 252-254-256-260-262-264 (e.g., H2M11162N).

[0508] In a related embodiment, the present disclosure provides antibodies, or antigen-binding fragments thereof, comprising a set of six CDRs (i.e., HCDR1-HCDR2-HCDR3-LCDR1-LCDR2-LCDR3) contained within an HCVR/LCVR amino acid sequence pair as defined by any of the exemplary anti-STEAP2 antibodies listed in Table 1. For example, the present disclosure includes antibodies, or antigen-binding fragments thereof, comprising the HCDR1-HCDR2-HCDR3-LCDR1-LCDR2-LCDR3 amino acid sequences set contained within an HCVR/LCVR amino acid sequence pair selected from the group consisting of SEQ ID NOs: 250/258 (e.g., H2M11162N). Methods and techniques for identifying CDRs within HCVR and LCVR amino acid sequences are well known in the art and can be used to identify CDRs within the specified HCVR and/or LCVR amino acid sequences disclosed herein. Exemplary conventions that can be used to identify the boundaries of CDRs include, e.g., the Kabat definition, the Chothia definition, and the AbM definition. In general terms, the Kabat definition is based on sequence variability, the Chothia definition is based on the location of the structural loop regions, and the AbM definition is a compromise between the Kabat and Chothia approaches. See, e.g., Kabat, “Sequences of Proteins of Immunological Interest,” National Institutes of Health, Bethesda, Md. (1991); Al-Lazikani et al., J. Mol. Biol. 273:927-948 (1997); and Martin et al., Proc. Natl. Acad. Sci. USA 86:9268-9272 (1989). Public databases are also available for identifying CDR sequences within an antibody.

[0509] The present disclosure also provides nucleic acid molecules encoding anti-STEAP2 antibodies or portions thereof. For example, the present disclosure provides nucleic acid molecules encoding any of the HCVR amino acid sequences listed in Table 1; in certain embodiments the nucleic acid molecule comprises a polynucleotide sequence selected from any of the HCVR nucleic acid sequences listed in Table 2, or a substantially similar sequence thereof having at least 90%, at least 95%, at least 98% or at least 99% sequence identity thereto.

[0510] The present disclosure also provides nucleic acid molecules encoding any of the LCVR amino acid sequences listed in Table 1; in certain embodiments the nucleic acid molecule comprises a polynucleotide sequence selected from any of the LCVR nucleic acid sequences listed in Table 2, or a substantially similar sequence thereof having at least 90%, at least 95%, at least 98% or at least 99% sequence identity thereto.

[0511] The present disclosure also provides nucleic acid molecules encoding any of the HCDR1 amino acid sequences listed in Table 1; in certain embodiments the nucleic acid molecule comprises a polynucleotide sequence selected from any of the HCDR1 nucleic acid sequences listed in Table 2, or a substantially similar sequence thereof having at least 90%, at least 95%, at least 98% or at least 99% sequence identity thereto.

[0512] The present disclosure also provides nucleic acid molecules encoding any of the HCDR2 amino acid sequences listed in Table 1; in certain embodiments the nucleic acid molecule comprises a polynucleotide sequence selected from any of the HCDR2 nucleic acid sequences listed in Table 2, or a substantially similar sequence thereof having at least 90%, at least 95%, at least 98% or at least 99% sequence identity thereto.

[0513] The present disclosure also provides nucleic acid molecules encoding any of the HCDR3 amino acid sequences listed in Table 1; in certain embodiments the nucleic acid molecule comprises a polynucleotide sequence selected from any of the HCDR3 nucleic acid sequences listed in Table 2, or a substantially similar sequence thereof having at least 90%, at least 95%, at least 98% or at least 99% sequence identity thereto.

[0514] The present disclosure also provides nucleic acid molecules encoding any of the LCDR1 amino acid sequences listed in Table 1; in certain embodiments the nucleic acid molecule comprises a polynucleotide sequence selected from any of the LCDR1 nucleic acid sequences listed in Table 2, or a substantially similar sequence thereof having at least 90%, at least 95%, at least 98% or at least 99% sequence identity thereto.

[0515] The present disclosure also provides nucleic acid molecules encoding any of the LCDR2 amino acid sequences listed in Table 1; in certain embodiments the nucleic acid molecule comprises a polynucleotide sequence selected from any of the LCDR2 nucleic acid sequences listed in Table 2, or a substantially similar sequence thereof having at least 90%, at least 95%, at least 98% or at least 99% sequence identity thereto.

[0516] The present disclosure also provides nucleic acid molecules encoding any of the LCDR3 amino acid sequences listed in Table 1; in certain embodiments the nucleic acid molecule comprises a polynucleotide sequence selected from any of the LCDR3 nucleic acid sequences listed in Table 2, or a substantially similar sequence thereof having at least 90%, at least 95%, at least 98% or at least 99% sequence identity thereto.

[0517] The present disclosure also provides nucleic acid molecules encoding an HCVR, wherein the HCVR comprises a set of three CDRs (i.e., HCDR1-HCDR2-HCDR3), wherein the HCDR1-HCDR2-HCDR3 amino acid sequence set is as defined by any of the exemplary anti-STEAP2 antibodies listed in Table 1.

[0518] The present disclosure also provides nucleic acid molecules encoding an LCVR, wherein the LCVR comprises a set of three CDRs (i.e., LCDR1-LCDR2-LCDR3), wherein the LCDR1-LCDR2-LCDR3 amino acid sequence set is as defined by any of the exemplary anti-STEAP2 antibodies listed in Table 1.

[0519] The present disclosure also provides nucleic acid molecules encoding both an HCVR and an LCVR, wherein the HCVR comprises an amino acid sequence of any of the HCVR amino acid sequences listed in Table 1, and wherein the LCVR comprises an amino acid sequence of any of the LCVR amino acid sequences listed in Table 1. In certain embodiments, the nucleic acid molecule comprises a polynucleotide sequence selected from any of the HCVR nucleic acid sequences listed in Table 2, or a substantially similar sequence thereof having at least 90%, at least 95%, at least 98% or at least 99% sequence identity thereto, and a polynucleotide sequence selected from any of the LCVR nucleic acid sequences listed in Table 2, or a substantially similar sequence thereof having at least 90%, at least 95%, at least 98% or at least 99% sequence identity thereto. In certain embodiments according to this aspect of the disclosure, the nucleic acid molecule encodes an HCVR and LCVR, wherein the HCVR and LCVR are both derived from the same anti-STEAP2 antibody listed in Table 1.

[0520] The present disclosure also provides recombinant expression vectors capable of expressing a polypeptide comprising a heavy or light chain variable region of an anti-STEAP2 antibody. For example, the present disclosure includes recombinant expression vectors comprising any of the nucleic acid molecules mentioned above, i.e., nucleic acid molecules encoding any of the HCVR, LCVR, and/or CDR sequences as set forth in Table 1. Also included within the scope of the present disclosure are host cells into which such vectors have been introduced, as well as methods of producing the antibodies or portions thereof by culturing the host cells under conditions permitting production of the antibodies or antibody fragments, and recovering the antibodies and antibody fragments so produced.

[0521] The present disclosure includes anti-STEAP2 antibodies having a modified glycosylation pattern. In some embodiments, modification to remove undesirable glycosylation sites may be useful, or an antibody lacking a fucose moiety present on the oligosaccharide chain, for example, to increase antibody dependent cellular cytotoxicity (ADCC) function (see Shield et al. (2002) JBC 277:26733). In other applications, modification of galactosylation can be made in order to modify complement dependent cytotoxicity (CDC).

[0522] In another aspect, the disclosure provides a pharmaceutical composition comprising a recombinant human antibody or fragment thereof which specifically binds STEAP2 and a pharmaceutically acceptable carrier. In a related aspect, the disclosure features a composition which is a combination of an anti-STEAP2 antibody and a second therapeutic agent. In one embodiment, the second therapeutic agent is any agent that is advantageously combined with an anti-STEAP2 antibody. Additional combination therapies and co-formulations involving the anti-STEAP2 antibodies of the present disclosure are disclosed elsewhere herein.

[0523] In another aspect, the disclosure provides therapeutic methods for targeting/killing tumor cells expressing STEAP2 using an anti-STEAP2 antibody of the disclosure, wherein the therapeutic methods comprise administering a therapeutically effective amount of a pharmaceutical composition comprising an anti-STEAP2 antibody of the disclosure to a subject in need thereof. In some cases, the anti-STEAP2 antibodies (or antigen-binding fragments thereof) can be used for treating prostate cancer, or may be modified to be more cytotoxic by methods, including but not limited to, modified Fc domains to increase ADCC (see e.g., Shield et al. (2002) JBC 277:26733), radioimmunotherapy, antibody-drug conjugates, or other methods for increasing the efficiency of tumor ablation.

[0524] The present disclosure also includes the use of an anti-STEAP2 antibody of the disclosure in the manufacture of a medicament for the treatment of a disease or disorder (e.g., cancer) related to or caused by STEAP2-expressing cells. In one aspect, the disclosure relates to a compound comprising an anti-STEAP2 antibody or antigen-binding fragment, or a STEAP2×CD3 bispecific antibody, as disclosed herein, for use in medicine. In one aspect, the disclosure relates to a compound comprising an antibody-drug conjugate (ADC) as disclosed herein, for use in medicine.

[0525] In yet another aspect, the disclosure provides monospecific anti-STEAP2 antibodies for diagnostic applications, such as, e.g., imaging reagents.

[0526] In yet another aspect, the disclosure provides therapeutic methods for stimulating T cell activation using an anti-CD3 antibody or antigen-binding portion of an antibody of the disclosure, wherein the therapeutic methods comprise administering a therapeutically effective amount of a pharmaceutical composition comprising an antibody

[0527] In another aspect, the present disclosure provides an isolated antibody or antigen-binding fragment thereof that binds STEAP2-expressing C4-2 cells with an EC50 of less than 50 nM as measured by FACS analysis. In another aspect, the present disclosure provides an isolated antibody or antigen-binding fragment thereof that binds and is internalized by STEAP2-expressing C4-2 cells.

[0528] The disclosure further provides an antibody or antigen-binding fragment that competes for binding to human STEAP2 with a reference antibody comprising an HCVR/LCVR amino acid sequence pair as set forth in Table 1. In another aspect, the disclosure provides an antibody or antigen-binding fragment that competes for binding to human STEAP2 with a reference antibody comprising an HCVR/LCVR amino acid sequence pair selected from the group consisting of SEQ ID NOs:2/10; 18/26; 34/42; 50/58; 66/58; 74/58; 82/58; 90/58; 98/58; 106/114; 122/130; 138/146; 154/162; 170/178; 186/194; 202/210; 218/226; 234/242; 250/258; 266/274; 282/290; 298/306; 314/322; 330/338; 346/354; 362/370; and 378/386.

[0529] The disclosure furthermore provides an antibody or antigen-binding fragment, wherein the antibody or antigen-binding fragment thereof binds to the same epitope on human STEAP2 as a reference antibody comprising an HCVR/LCVR amino acid sequence pair as set forth in Table 1. In another aspect, the antibody or antigen-binding fragment binds to the same epitope on human STEAP2 as a reference antibody comprising an HCVR/LCVR amino acid sequence pair selected from the group consisting of SEQ ID NOs:2/10; 18/26; 34/42; 50/58; 66/58; 74/58; 82/58; 90/58; 98/58; 106/114; 122/130; 138/146; 154/162; 170/178; 186/194; 202/210; 218/226; 234/242; 250/258; 266/274; 282/290; 298/306; 314/322; 330/338; 346/354; 362/370; and 378/386.

[0530] The disclosure further provides an isolated antibody or antigen-binding fragment thereof that binds human STEAP2, wherein the antibody or antigen-binding fragment comprises: the complementarity determining regions (CDRs) of a heavy chain variable region (HCVR) having an amino acid sequence as set forth in Table 1; and the CDRs of a light chain variable region (LCVR) having an amino acid sequence as set forth in Table 1. In another aspect, the isolated antibody or antigen-binding fragment comprises the heavy and light chain CDRs of a HCVR/LCVR amino acid sequence pair selected from the group consisting of: SEQ ID NOs:2/10; 18/26; 34/42; 50/58; 66/58; 74/58; 82/58; 90/58; 98/58; 106/114; 122/130; 138/146; 154/162; 170/178; 186/194; 202/210; 218/226; 234/242; 250/258; 266/274; 282/290; 298/306; 314/322; 330/338; 346/354; 362/370; and 378/386. In yet another aspect, the isolated antibody or antigen-binding fragment comprises HCDR1-HCDR2-HCDR3-LCDR1-LCDR2-LCDR3 domains, respectively, selected from the group consisting of: SEQ ID NOs:4-6-8-12-14-16; 20-22-24-28-30-32; 36-38-40-44-46-48; 52-54-56-60-62-64; 68-70-72-60-62-64; 76-78-80-60-62-64; 84-86-88-60-62-64; 92-94-96-60-62-64; 100-102-104-60-62-64; 108-110-112-116-118-120; 124-126-128-132-134-136; 140-142-144-148-150-152; 156-158-160-164-166-168; 172-174-176-180-182-184; 188-190-192-196-198-200; 204-206-208-212-214-216; 220-222-224-228-230-232; 236-238-240-244-246-248; 252-254-256-260-262-264; 268-270-272-276-278-280; 284-286-288-292-294-296; 300-302-304-308-310-312; 316-318-320-324-326-328; 332-334-336-340-342-344; 348-350-352-356-358-360; 364-366-368-372-374-376; and 380-382-384-388-390-392.

[0531] In another aspect, the disclosure provides an isolated antibody or antigen-binding fragment thereof that binds human STEAP2, wherein the antibody or antigen-binding fragment comprises: (a) a heavy chain variable region (HCVR) having an amino acid sequence selected from the group consisting of SEQ ID NOs: 2, 18, 34, 50, 66, 74, 82, 90, 98, 106, 122, 138, 154, 170, 186, 202, 218, 234, 250, 266, 282, 298, 314, 330, 346, 362, and 378; and (b) a light chain variable region (LCVR) having an amino acid sequence selected from the group consisting of SEQ ID NOs: 10; 26; 42; 58 114; 130; 146; 162; 178; 194; 210; 226, 242; 258; 274; 290; 306; 322; 338; 354; 370; and 386. In a further aspect, the isolated antibody or antigen-binding fragment of claim 10, wherein the antibody or antigen-binding fragment comprises a HCVR/LCVR amino acid sequence pair selected from the group consisting of: SEQ ID NOs:2/10; 18/26; 34/42; 50/58; 66/58; 74/58; 82/58; 90/58; 98/58; 106/114; 122/130; 138/146; 154/162; 170/178; 186/194; 202/210; 218/226; 234/242; 250/258; 266/274; 282/290; 298/306; 314/322; 330/338; 346/354; 362/370; and 378/386.

[0532] According to another aspect, the present disclosure provides antibody-drug conjugates comprising an anti-STEAP2 antibody or antigen-binding fragment thereof as described above and a therapeutic agent (e.g., an anti-tumor agent, e.g., a camptothecin analog, e.g., Dxd). In some embodiments, the antibody or antigen-binding fragment and the anti-tumor agent are covalently attached via a linker, as discussed above. In various embodiments, the anti-STEAP2 antibody or antigen-binding fragment can be any of the anti-STEAP 2 antibodies or fragments described herein.

### Heavy and Light Chain Variable Region Amino Acid and Nucleic Acid Sequences of Anti-STEAP2 Antibodies

[0533] Table 1 sets forth the amino acid sequence identifiers of the heavy and light chain variable regions and CDRs of selected anti-STEAP2 antibodies according to the disclosure. The corresponding nucleic acid sequence identifiers are set forth in Table 2.

TABLE 1
Amino Acid Sequence Identifiers of anti-STEAP2 antibodies

| Antibody | SEQ ID NOS: | | | | | | | |
|---|---|---|---|---|---|---|---|---|
| Designation | HCVR | HCDR1 | HCDR2 | HCDR3 | LCVR | LCDR1 | LCDR2 | LCDR3 |
| H1H11243N | 2 | 4 | 6 | 8 | 10 | 12 | 14 | 16 |
| H1H11878P | 18 | 20 | 22 | 24 | 26 | 28 | 30 | 32 |
| H1H11880P | 34 | 36 | 38 | 40 | 42 | 44 | 46 | 48 |
| H1H11888P2 | 50 | 52 | 54 | 56 | 58 | 60 | 62 | 64 |
| H1H11892P2 | 66 | 68 | 70 | 72 | 58 | 60 | 62 | 64 |
| H1H11893P2 | 74 | 76 | 78 | 80 | 58 | 60 | 62 | 64 |
| H1H11894P2 | 82 | 84 | 86 | 88 | 58 | 60 | 62 | 64 |
| H1H11895P2 | 90 | 92 | 94 | 96 | 58 | 60 | 62 | 64 |
| H1H11896P2 | 98 | 100 | 102 | 104 | 58 | 60 | 62 | 64 |
| H1H11897P2 | 106 | 108 | 110 | 112 | 114 | 116 | 118 | 120 |
| H1H7968P | 122 | 124 | 126 | 128 | 130 | 132 | 134 | 136 |
| H1H7969P | 138 | 140 | 142 | 144 | 146 | 148 | 150 | 152 |
| H1H7970P | 154 | 156 | 158 | 160 | 162 | 164 | 166 | 168 |
| H1H7971P | 170 | 172 | 174 | 176 | 178 | 180 | 182 | 184 |
| H1H7972P | 186 | 188 | 190 | 192 | 194 | 196 | 198 | 200 |
| H1M7804N | 202 | 204 | 206 | 208 | 210 | 212 | 214 | 216 |
| H1M7814N | 218 | 220 | 222 | 224 | 226 | 228 | 230 | 232 |
| H1M7832N | 234 | 236 | 238 | 240 | 242 | 244 | 246 | 248 |
| H2M11162N | 250 | 252 | 254 | 256 | 258 | 260 | 262 | 264 |
| H2M11163N | 266 | 268 | 270 | 272 | 274 | 276 | 278 | 280 |
| H2M11164N | 282 | 284 | 286 | 288 | 290 | 292 | 294 | 296 |
| H2M7806N | 298 | 300 | 302 | 304 | 306 | 308 | 310 | 312 |
| H2M7807N | 314 | 316 | 318 | 320 | 322 | 324 | 326 | 328 |
| H2M7809N | 330 | 332 | 334 | 336 | 338 | 340 | 342 | 344 |
| H2M7810N | 346 | 348 | 350 | 352 | 354 | 356 | 358 | 360 |
| H2M7811N | 362 | 364 | 366 | 368 | 370 | 372 | 374 | 376 |
| H2M7812N | 378 | 380 | 382 | 384 | 386 | 388 | 390 | 392 |

TABLE 2
Nucleic Acid Sequence Identifiers of anti-STEAP2 antibodies

| Antibody | SEQ ID NOS: | | | | | | | |
|---|---|---|---|---|---|---|---|---|
| Designation | HCVR | HCDR1 | HCDR2 | HCDR3 | LCVR | LCDR1 | LCDR2 | LCDR3 |
| H1H11243N | 1 | 3 | 5 | 7 | 9 | 11 | 13 | 15 |
| H1H11878P | 17 | 19 | 21 | 23 | 25 | 27 | 29 | 31 |
| H1H11880P | 33 | 35 | 37 | 39 | 41 | 43 | 45 | 47 |
| H1H11888P2 | 49 | 51 | 53 | 55 | 57 | 59 | 61 | 63 |
| H1H11892P2 | 65 | 67 | 69 | 71 | 57 | 59 | 61 | 63 |
| H1H11893P2 | 73 | 75 | 77 | 79 | 57 | 59 | 61 | 63 |
| H1H11894P2 | 81 | 83 | 85 | 87 | 57 | 59 | 61 | 63 |
| H1H11895P2 | 89 | 91 | 93 | 95 | 57 | 59 | 61 | 63 |
| H1H11896P2 | 97 | 99 | 101 | 103 | 57 | 59 | 61 | 63 |
| H1H11897P2 | 105 | 107 | 109 | 111 | 113 | 115 | 117 | 119 |
| H1H7968P | 121 | 123 | 125 | 127 | 129 | 131 | 133 | 135 |
| H1H7969P | 137 | 139 | 141 | 143 | 145 | 147 | 149 | 151 |
| H1H7970P | 153 | 155 | 157 | 159 | 161 | 163 | 165 | 167 |
| H1H7971P | 169 | 171 | 173 | 175 | 177 | 179 | 181 | 183 |
| H1H7972P | 185 | 187 | 189 | 191 | 193 | 195 | 197 | 199 |
| H1M7804N | 201 | 203 | 205 | 207 | 209 | 211 | 213 | 215 |
| H1M7814N | 217 | 219 | 221 | 223 | 225 | 227 | 229 | 231 |
| H1M7832N | 233 | 235 | 237 | 239 | 241 | 243 | 245 | 247 |
| H2M11162N | 249 | 251 | 253 | 255 | 257 | 259 | 261 | 263 |
| H2M11163N | 265 | 267 | 269 | 271 | 273 | 275 | 277 | 279 |
| H2M11164N | 281 | 283 | 285 | 287 | 289 | 291 | 293 | 295 |
| H2M7806N | 297 | 299 | 301 | 303 | 305 | 307 | 309 | 311 |
| H2M7807N | 313 | 315 | 317 | 319 | 321 | 323 | 325 | 327 |
| H2M7809N | 329 | 331 | 333 | 335 | 337 | 339 | 341 | 343 |
| H2M7810N | 345 | 347 | 349 | 351 | 353 | 355 | 357 | 359 |
| H2M7811N | 361 | 363 | 365 | 367 | 369 | 371 | 373 | 375 |

### Anti-MET Antibodies Suitable for Protein-Drug Conjugates

[0534] In some embodiments, the antibody is an anti MET antibody. According to certain embodiments, protein-drug conjugates, e.g., ADCs, according to the disclosure comprise anti-MET antibody. In some embodiment, the anti-MET antibody may include those described in US 2018/0134794.

[0535] In some embodiments, the antibody is an anti-MET/MET bispecific antibody, which comprises a first antigen-binding domain (D1) which specifically binds a first epitope of human MET and a second antigen-binding domain (D2) which specifically binds a second epitope of human MET. In some embodiment, the anti-MET/MET bispecific antibody may include those described in US 2018/0134794.

[0536] In certain embodiments, D1 and D2 domains of an anti-MET/MET bispecific antibody are non-competitive with one another. Non-competition between D1 and D2 for binding to MET means that, the respective monospecific antigen binding proteins from which D1 and D2 were derived do not compete with one another for binding to human MET. Exemplary antigen-binding protein competition assays are known in the art.

[0537] In certain embodiments, D1 and D2 bind to different (e.g., non-overlapping, or partially overlapping) epitopes on MET.

[0538] In one non-limiting embodiment, the present disclosure provides protein-drug conjugates comprising a bispecific antigen-binding molecule comprising:
[0539] a first antigen-binding domain (D1); and
[0540] a second antigen-binding domain (D2);
[0541] wherein D1 specifically binds a first epitope of human MET; and
[0542] wherein D2 specifically binds a second epitope of human MET.

[0543] Anti-MET/MET bispecific antibodies may be constructed using the antigen-binding domains of two separate monospecific anti-MET antibodies. For example, a collection of monoclonal monospecific anti-MET antibodies may be produced using standard methods known in the art. The individual antibodies thus produced may be tested pairwise against one another for cross-competition to a MET protein. If two different anti-MET antibodies are able to bind to MET at the same time (i.e., do not compete with one another), then the antigen-binding domain from the first anti-MET antibody and the antigen-binding domain from the second, non-competitive anti-MET antibody can be engineered into a single anti-MET/MET bispecific antibody in accordance with the present disclosure.

[0544] According to the present disclosure, a bispecific antigen-binding molecule can be a single multifunctional polypeptide, or it can be a multimeric complex of two or more polypeptides that are covalently or non-covalently associated with one another. As will be made evident by the present disclosure, any antigen binding construct which has the ability to simultaneously bind two separate, non-identical epitopes of the MET molecule is regarded as a bispecific antigen-binding molecule. Any of the bispecific antigen-binding molecules described herein, or variants thereof, may be constructed using standard molecular biological techniques (e.g., recombinant DNA and protein expression technology) as will be known to a person of ordinary skill in the art.

[0545] The bispecific antigen-binding molecules, which comprise a first antigen-binding domain (D1) which specifically binds a first epitope of human MET and a second antigen-binding domain (D2) which specifically binds a second epitope of human MET, may be referred to herein as “MET/MET bispecific antibodies,” “MET×MET bispecific antibodies,” “MET/MET,” “MET×MET” or other related terminology. In some embodiments, the first epitope of human MET comprises amino acids 192-204 of SEQ ID NO:2109. In some embodiments, the second epitope of human MET comprises amino acids 305-315 and 421-455 of SEQ ID NO:2109. In some embodiments, the first epitope of human MET comprises amino acids 192-204 of SEQ ID NO:2109; and the second epitope of human MET comprises amino acids 305-315 and 421-455 of SEQ ID NO:2109.

[0546] Exemplary antigen-binding domains (D1 and D2) that can be included in the MET×MET bispecific antigen-binding molecules provided herein include antigen-binding domains derived from any of the anti-MET antibodies disclosed herein. For example, the present disclosure includes MET×MET bispecific antigen-binding molecules comprising a D1 or D2 antigen-binding domain comprising an HCVR comprising an amino acid sequence selected from any of the HCVR amino acid sequences listed in Table 3, or a substantially similar sequence thereof having at least 90%, at least 95%, at least 98% or at least 99% sequence identity thereto.

[0547] Also provided herein are MET×MET bispecific antigen-binding molecules comprising a D1 or D2 antigen-binding domain comprising an LCVR comprising an amino acid sequence selected from any of the LCVR amino acid sequences listed in Table 3, or a substantially similar sequence thereof having at least 90%, at least 95%, at least 98% or at least 99% sequence identity thereto.

[0548] Provided herein are MET×MET bispecific antigen-binding molecules comprising a D1 or D2 antigen-binding domain comprising an HCVR and an LCVR amino acid sequence pair (HCVR/LCVR) comprising any of the HCVR amino acid sequences listed in Table 3 paired with any of the LCVR amino acid sequences listed in Table 3. According to certain embodiments, the present invention provides MET×MET bispecific antigen-binding molecules comprising a D1 or D2 antigen-binding domain comprising an HCVR/LCVR amino acid sequence pair contained within any of the exemplary anti-MET antibodies listed in Table 3.

[0549] Also provided herein are MET×MET bispecific antigen-binding molecules comprising a D1 or D2 antigen-binding domain comprising a heavy chain CDR1 (HCDR1) comprising an amino acid sequence selected from any of the HCDR1 amino acid sequences listed in Table 3 or a substantially similar sequence thereof having at least 90%, at least 95%, at least 98% or at least 99% sequence identity.

[0550] Also provided are MET×MET bispecific antigen-binding molecules comprising a D1 or D2 antigen-binding domain comprising a heavy chain CDR2 (HCDR2) comprising an amino acid sequence selected from any of the HCDR2 amino acid sequences listed in Table 3 or a substantially similar sequence thereof having at least 90%, at least 95%, at least 98% or at least 99% sequence identity.

[0551] Also provided are MET×MET bispecific antigen-binding molecules comprising a D1 or D2 antigen-binding domain comprising a heavy chain CDR3 (HCDR3) comprising an amino acid sequence selected from any of the HCDR3 amino acid sequences listed in Table 3 or a substantially similar sequence thereof having at least 90%, at least 95%, at least 98% or at least 99% sequence identity.

[0552] Also provided are MET×MET bispecific antigen-binding molecules comprising a D1 or D2 antigen-binding domain comprising a light chain CDR1 (LCDR1) comprising an amino acid sequence selected from any of the LCDR1 amino acid sequences listed in Table 3 or a substantially similar sequence thereof having at least 90%, at least 95%, at least 98% or at least 99% sequence identity.

[0553] Also provided are MET×MET bispecific antigen-binding molecules comprising a D1 or D2 antigen-binding domain comprising a light chain CDR2 (LCDR2) comprising an amino acid sequence selected from any of the LCDR2 amino acid sequences listed in Table 3 or a substantially similar sequence thereof having at least 90%, at least 95%, at least 98% or at least 99% sequence identity.

[0554] Also provided are MET×MET bispecific antigen-binding molecules comprising a D1 or D2 antigen-binding domain comprising a light chain CDR3 (LCDR3) comprising an amino acid sequence selected from any of the LCDR3 amino acid sequences listed in Table 3 or a substantially similar sequence thereof having at least 90%, at least 95%, at least 98% or at least 99% sequence identity.

[0555] Also provided are MET×MET bispecific antigen-binding molecules comprising a D1 or D2 antigen-binding domain comprising an HCDR3 and an LCDR3 amino acid sequence pair (HCDR3/LCDR3) comprising any of the HCDR3 amino acid sequences listed in Table 3 paired with any of the LCDR3 amino acid sequences listed in Table 3. According to certain embodiments, the present disclosure provides antibodies, or antigen-binding fragments thereof, comprising an HCDR3/LCDR3 amino acid sequence pair contained within any of the exemplary anti-MET antibodies listed in Table 3.

[0556] Also provided are MET×MET bispecific antigen-binding molecules comprising a D1 or D2 antigen-binding domain comprising a set of six CDRs (i.e., HCDR1-HCDR2-HCDR3-LCDR1-LCDR2-LCDR3) contained within any of the exemplary anti-MET antibodies listed in Table 3.

[0557] In a related embodiment, the present disclosure provides MET×MET bispecific antigen-binding molecules comprising a D1 or D2 antigen-binding domain comprising a set of six CDRs (i.e., HCDR1-HCDR2-HCDR3-LCDR1-LCDR2-LCDR3) contained within an HCVR/LCVR amino acid sequence pair as defined by any of the exemplary anti-MET antibodies listed in Table 3.

[0558] The MET×MET bispecific antigen-binding molecules provided herein may comprise a D1 antigen-binding domain derived from any of the anti-MET antibodies of Table 3, and a D2 antigen-binding domain derived from any other anti-MET antibody of Table 3. Non-limiting examples of MET×MET bispecific antibodies of the present disclosure are depicted in FIG. 10. FIG. 10 is a matrix illustrating the components of 272 exemplary MET×MET bispecific antibodies. Each numbered cell of the matrix (numbered 1 through 272) identifies a unique bispecific antibody comprising a “D1” antigen binding domain and a “D2” antigen binding domain, wherein the D1 antigen binding domain comprises the immunoglobulin variable domain (HCVR/LCVR amino acid sequence pair) or CDRs from the corresponding anti-MET antibody listed along the Y-axis, and wherein the D2 antigen binding domain comprises the immunoglobulin variable domain (HCVR/LCVR amino acid sequence pair) or CDRs from the corresponding anti-MET antibody listed along the X-axis. Thus, for example, the MET×MET bispecific antigen-binding molecule “number 10” shown in the matrix comprises a D1 antigen-binding domain comprising an HCVR/LCVR pair, or 6-CDR set, from the exemplary anti-MET antibody H4H13290P2, and a D2 antigen-binding domain comprising an HCVR/LCVR pair, or 6-CDR set, from the exemplary anti-MET antibody H4H13321P2.

[0559] As a non-limiting illustrative example, the present disclosure includes MET×MET bispecific antigen binding molecules comprising a D1 antigen-binding domain and a D2 antigen-binding domain, wherein the D1 antigen binding domain comprises an HCVR/LCVR amino acid sequence pair of SEQ ID NOs: 2012/2092, or a set of heavy and light chain CDRs (HCDR1-HCDR2-HCDR3-LCDR1-LCDR2-LCDR3) comprising SEQ ID NOs: 2014-2016-2018-2094-2096-2098, and wherein the D2 antigen-binding domain comprises an HCVR/LCVR amino acid sequence pair of SEQ ID NOs: 2036/2092, or a set of heavy and light chain CDRs (HCDR1-HCDR2-HCDR3-LCDR1-LCDR2-LCDR3) comprising SEQ ID NOs: 2038-2040-2042-2094-2096-2098. An exemplary MET×MET bispecific antibody having these sequence characteristics is the bispecific antibody designated H4H14639D, also referred to as bispecific antibody No. 2076, which comprises a D1 derived from H4H13306P2 and a D2 derived from H4H13312P2.

### Heavy and Light Chain Variable Region Amino Acid and Nucleic Acid Sequences for Anti-MET and MET/MET Antibodies

[0560] Table 3 sets forth the amino acid sequence identifiers of the heavy and light chain variable regions and CDRs of selected anti-MET antibodies described herein. (As noted above, all anti-MET antibodies of the present disclosure possess the same light chain variable region, and thus the same light chain CDR sequences as well). The corresponding nucleic acid sequence identifiers are set forth in Table 4.

TABLE 3
Amino Acid Sequence Identifiers

| Antibody | SEQ ID NOS: | | | | | | | |
|---|---|---|---|---|---|---|---|---|
| Designation | HCVR | HCDR1 | HCDR2 | HCDR3 | LCVR | LCDR1 | LCDR2 | LCDR3 |
| H4H13290P2 | 1956 | 1958 | 1960 | 1962 | 2092 | 2094 | 2096 | 2098 |
| H4H13291P2 | 1964 | 1966 | 1968 | 1970 | 2092 | 2094 | 2096 | 2098 |
| H4H13295P2 | 1972 | 1974 | 1976 | 1978 | 2092 | 2094 | 2096 | 2098 |
| H4H13299P2 | 1980 | 1982 | 1984 | 1986 | 2092 | 2094 | 2096 | 2098 |
| H4H13300P2 | 1988 | 1990 | 1992 | 1994 | 2092 | 2094 | 2096 | 2098 |
| H4H13301P2 | 1996 | 1998 | 2000 | 2002 | 2092 | 2094 | 2096 | 2098 |
| H4H13302P2 | 2004 | 2006 | 2008 | 2010 | 2092 | 2094 | 2096 | 2098 |
| H4H13306P2 | 2012 | 2014 | 2016 | 2018 | 2092 | 2094 | 2096 | 2098 |
| H4H13309P2 | 2020 | 2022 | 2024 | 2026 | 2092 | 2094 | 2096 | 2098 |
| H4H13311P2 | 2028 | 2030 | 2032 | 2034 | 2092 | 2094 | 2096 | 2098 |
| H4H13312P2 | 2036 | 2038 | 2040 | 2042 | 2092 | 2094 | 2096 | 2098 |
| H4H13313P2 | 2044 | 2046 | 2048 | 2050 | 2092 | 2094 | 2096 | 2098 |
| H4H13316P2 | 2052 | 2054 | 2056 | 2058 | 2092 | 2094 | 2096 | 2098 |
| H4H13318P2 | 2060 | 2062 | 2064 | 2066 | 2092 | 2094 | 2096 | 2098 |
| H4H13319P2 | 2068 | 2070 | 2072 | 2074 | 2092 | 2094 | 2096 | 2098 |
| H4H13325P2 | 2076 | 2078 | 2080 | 2082 | 2092 | 2094 | 2096 | 2098 |
| H4H13331P2 | 2084 | 2086 | 2088 | 2090 | 2092 | 2094 | 2096 | 2098 |

TABLE 4
Nucleic Acid Sequence Identifiers

| Antibody | SEQ ID NOS: | | | | | | | |
|---|---|---|---|---|---|---|---|---|
| Designation | HCVR | HCDR1 | HCDR2 | HCDR3 | LCVR | LCDR1 | LCDR2 | LCDR3 |
| H4H13290P2 | 1955 | 1957 | 1959 | 1961 | 2091 | 2093 | 2095 | 2097 |
| H4H13291P2 | 1963 | 1965 | 1967 | 1969 | 2091 | 2093 | 2095 | 2097 |
| H4H13295P2 | 1971 | 1973 | 1975 | 1977 | 2091 | 2093 | 2095 | 2097 |
| H4H13299P2 | 1979 | 1981 | 1983 | 1985 | 2091 | 2093 | 2095 | 2097 |
| H4H13300P2 | 1987 | 1989 | 1991 | 1993 | 2091 | 2093 | 2095 | 2097 |
| H4H13301P2 | 1995 | 1997 | 1999 | 2001 | 2091 | 2093 | 2095 | 2097 |
| H4H13302P2 | 2003 | 2005 | 2007 | 2009 | 2091 | 2093 | 2095 | 2097 |
| H4H13306P2 | 2011 | 2013 | 2015 | 2017 | 2091 | 2093 | 2095 | 2097 |
| H4H13309P2 | 2019 | 2021 | 2023 | 2025 | 2091 | 2093 | 2095 | 2097 |
| H4H13311P2 | 2027 | 2029 | 2031 | 2033 | 2091 | 2093 | 2095 | 2097 |
| H4H13312P2 | 2035 | 2037 | 2039 | 2041 | 2091 | 2093 | 2095 | 2097 |
| H4H13313P2 | 2043 | 2045 | 2047 | 2049 | 2091 | 2093 | 2095 | 2097 |
| H4H13316P2 | 2051 | 2053 | 2055 | 2057 | 2091 | 2093 | 2095 | 2097 |
| H4H13318P2 | 2059 | 2061 | 2063 | 2065 | 2091 | 2093 | 2095 | 2097 |
| H4H13319P2 | 2067 | 2069 | 2071 | 2073 | 2091 | 2093 | 2095 | 2097 |
| H4H13325P2 | 2075 | 2077 | 2079 | 2081 | 2091 | 2093 | 2095 | 2097 |
| H4H13331P2 | 2083 | 2085 | 2087 | 2089 | 2091 | 2093 | 2095 | 2097 |

[0561] Antibodies are typically referred to herein according to the following nomenclature: Fc prefix (e.g. “H-4H-”), followed by a numerical identifier (e.g. “13290,” “13291,” “13295,” etc.), followed by a “P2” suffix, as shown in Tables 3 and 4. Thus, according to this nomenclature, an antibody may be referred to herein as, e.g., “H41H13290P2,” “H41H13291 P2,” “H41H13295P2,” etc. The prefix on the antibody designations used herein indicate the particular Fc region isotype of the antibody. In particular, an “H4H” antibody has a human IgG4 Fc (all variable regions are fully human as denoted by the first‘H’ in the antibody designation). As will be appreciated by a person of ordinary skill in the art, an antibody having a particular Fc isotype can be converted to an antibody with a different Fc isotype (e.g., an antibody with a mouse IgG4 Fc can be converted to an antibody with a human IgG1, etc.), but in any event, the variable domains (including the CDRs)—which are indicated by the numerical identifiers shown in Tables 3 and 4-will remain the same, and the binding properties are expected to be identical or substantially similar regardless of the nature of the Fc domain.

### Antibody Conjugation

[0562] Techniques and linkers for conjugating to residues of an antibody or antigen binding fragment are known in the art. Exemplary amino acid attachments that can be used in the context of this aspect, e.g., lysine (see, e.g., U.S. Pat. No. 5,208,020; US 2010/0129314; Hollander et al., Bioconjugate Chem., 2008, 19:358-361; WO 2005/089808; U.S. Pat. No. 5,714,586; US 2013/0101546; and US 2012/0585592), cysteine (see, e.g., US 2007/0258987; WO 2013/055993; WO 2013/055990; WO 2013/053873; WO 2013/053872; WO 2011/130598; US 2013/0101546; and U.S. Pat. No. 7,750,116), selenoysteine (see, e.g., WO 2008/122039; and Hofer et al., Proc. Natl. Acad. Sci., USA, 2008, 105:12451-12456), formyl glycine (see, e.g., Carrico et al., Nat. Chem. Biol., 2007, 3:321-322; Agarwal et al., Proc. Natl. Acad. Sci., USA, 2013, 110:46-51, and Rabuka et al., Nat. Protocols, 2012, 10:1052-1067), non-natural amino acids (see, e.g., WO 2013/068874, and WO 2012/166559), and acidic amino acids (see, e.g., WO 2012/05982). Lysine conjugation can also proceed through NHS (N-hydroxy succinimide). Linkers can also be conjugated to cysteine residues, including cysteine residues of a cleaved interchain disulfide bond, by forming a carbon bridge between thiols (see, e.g., U.S. Pat. Nos. 9,951,141, and 9,950,076). Linkers can also be conjugated to an antigen-binding protein via attachment to carbohydrates (see, e.g., US 2008/0305497, WO 2014/065661, and Ryan et al., Food & Agriculture Immunol., 2001, 13:127-130) and disulfide linkers (see, e.g., WO 2013/085925, WO 2010/010324, WO 2011/018611, and Shaunak et al., Nat. Chem. Biol., 2006, 2:312-313). Site specific conjugation techniques can also be employed to direct conjugation to particular residues of the antibody or antigen binding protein (see, e.g., Schumacher et al. J Clin Immunol (2016) 36 (Suppl 1): 100). In specific embodiments discussed in more detail below, Site specific conjugation techniques, include glutamine conjugation via transglutaminase (see e.g., Schibli, Angew Chemie Inter Ed. 2010, 49, 9995).

[0563] Payloads according to the disclosure linked through lysine and/or cysteine, e.g., via a maleimide or amide conjugation, are included within the scope of the present disclosure.

[0564] In some embodiments, the protein-drug conjugates of the present disclosure are produced according to a two-step process, where Step 1 is lysine-based linker conjugation, e.g., with an NHS-ester linker, and Step 2 is a payload conjugation reaction (e.g., a 1,3-cycloaddition reaction).

[0565] In some embodiments, the protein-drug conjugates of the present disclosure are produced according to a two-step process, where Step 1 is cysteine-based linker conjugation, e.g., with a maleimide linker, and Step 2 is a payload conjugation reaction (e.g., a 1,3-cycloaddition reaction).

[0566] In some embodiments, the protein-drug conjugates of the present disclosure are produced according to a two-step process, where Step 1 is transglutaminase-mediated site specific conjugation and Step 2 is a payload conjugation reaction (e.g., a 1,3-cycloaddition reaction).

### Step 1: Transglutaminase Mediated Site Specific Conjugation

[0567] In some embodiments, proteins (e.g., antibodies) may be modified in accordance with known methods to provide glutaminyl modified proteins. Techniques for conjugating antibodies and primary amine compounds are known in the art. Site specific conjugation techniques are employed herein to direct conjugation to glutamine using glutamine conjugation via transglutaminase (see e.g., Schibli, Angew Chemie Inter Ed. 2010, 49, 9995).

[0568] Primary amine-comprising compounds (e.g., linkers L1) of the present disclosure can be conjugated to one or more glutamine residues of a binding agent (e.g., a protein, e.g., an antibody) via transglutaminase-based chemo-enzymatic conjugation (see, e.g., Dennler et al., Protein Conjugate Chem. 2014, 25, 569-578, and WO 2017/147542). For example, in the presence of transglutaminase, one or more glutamine residues of an antibody can be coupled to a primary amine linker compound. Briefly, in some embodiments, a binding agent having a glutamine residue (e.g., a gln295, i.e. Q295 residue) is treated with a primary amine-containing linker L1, described above, in the presence of the enzyme transglutaminase. In certain embodiments, the binding agent is aglycosylated. In certain embodiments, the binding agent is deglycosylated.

[0569] In certain embodiments, the binding agent (e.g., a protein, e.g., an antibody) comprises at least one glutamine residue in at least one polypeptide chain sequence. In certain embodiments, the binding agent comprises two heavy chain polypeptides, each with one gln295 residue. In further embodiments, the binding agent comprises one or more glutamine residues at a site other than a heavy chain 295.

[0570] In some embodiments, a binding agent, such as an antibody, can be prepared by site-directed mutagenesis to insert a glutamine residue at a site without resulting in disabled antibody function or binding. For example, included herein are antibodies bearing Asn297Gln (N297Q) mutation(s) as described herein. In some embodiments, an antibody having a gln295 residue and/or an N297Q mutation contains one or more additional naturally occurring glutamine residues in their variable regions, which can be accessible to transglutaminase and therefore capable of conjugation to a linker or a linker-payload. An exemplary naturally occurring glutamine residue can be found, e.g., at Q55 of the light chain. In such instances, the binding agent, e.g., antibody, conjugated via transglutaminase can have a higher than expected LAR value (e.g., a LAR higher than 4). Any such antibodies can be isolated from natural or artificial sources.

[0571] In certain embodiments of the disclosure, the linker-antibody ratio or LAR is from 1, 2, 3, 4, 5, 6, 7, or 8 linker L1 molecules per antibody. In some embodiments, the LAR is from 1 to 8. In some embodiments, the LAR is from 1 to 6. In certain embodiments, the LAR is from 2 to 4. In some cases, the LAR is from 2 to 3. In certain cases, the LAR is from 0.5 to 3.5. In some embodiments, the LAR is about 1, or about 1.5, or about 2, or about 2.5, or about 3, or about 3.5. In some embodiments, the LAR is 2. In some embodiments, the LAR is 4.

### Step 2: Payload Conjugation Reaction

[0572] In certain embodiments, linkers L1 according to the present disclosure comprise a branching unit B, which comprises at least one reactive group B′ capable of further reaction after transglutamination. In these embodiments, the glutaminyl-modified protein (e.g., antibody) is capable of further reaction with a reactive payload compound or a reactive linker-payload compound (e.g., L2-P as disclosed herein), to form a protein-payload conjugate. More specifically, the reactive linker-payload compound L2-P may comprise a reactive group B″ that is capable of reacting with the reactive group B′ of the linker L1. In certain embodiments, a reactive group B′ according to the present disclosure comprises a moiety that is capable of undergoing a 1,3-cycloaddition reaction. In certain embodiments, the reactive group B′ is an azide. In certain embodiments, the reactive group B″ comprises an alkyne (e.g., a terminal alkyne, or an internal strained alkyne). In certain embodiments of the present disclosure the reactive group B′ is compatible with the binding agent and transglutamination reaction conditions.

[0573] In certain embodiments of the disclosure, linker L1 molecules comprise a branching unit B which comprises one reactive group B′. In certain embodiments of the disclosure, linker L1 molecules comprise a branching unit B which comprises more than one reactive group B′.

[0574] In certain embodiments, the reactive linker-payload L2-P comprises one payload molecule (n=1). In certain other embodiments, the reactive linker-payload L2-P comprises two or more payload molecules (n 2). In certain embodiments, the reactive linker-payload L2-P comprises from 1 to 12 payload molecules, or from 1 to 10 payload molecules, or from 1 to 8 payload molecules, or from 1 to 6 payload molecules, or from 1 to 4 payload molecules, or from 1 to 2 payload molecules.

[0575] In certain embodiments, the reactive linker-payload L2-P comprises one payload molecule. When such L2-P is reacted with a BA-L1-B, the DAR will be about equal to the LAR of the BA-L1-B. For example, if L2-P comprising one payload molecule is reacted with a BA-L1-B having a LAR of 4 (e.g., via Q295 and N297Q transglutamination), the resulting protein-drug conjugate will have a DAR of 4.

[0576] In certain embodiments, the reactive linker-payload L2-P comprises 2 payload molecules. When such L2-P is reacted with a BA-L1-B, the DAR will be about 2 times the LAR of the BA-L1-B. For example, if L2-P comprising 2 payload molecules is reacted with a BA-L1-B having a LAR of 4 (e.g., via Q295 and N297Q transglutamination), the resulting protein-drug conjugate will have a DAR of 8.

[0577] For example, if L2-P comprising 3 payload molecules is reacted with a BA-L1-B having a LAR of 8 (e.g., via Q295 and N297Q transglutamination of a branched L1-B unit comprising 2 groups B), the resulting protein-drug conjugate will have a DAR of 24.

[0578] In certain embodiments of the disclosure, the drug-antibody ratio or DAR (e.g., abbreviated as the lower case letter n) is from about 1 to about 30, or from about 1 to about 24, or from about 1 to about 20, or from about 1 to about 16, or from about 1 to about 12, or from about 1 to about 10, or from about 1 to about 8, or about 1, 2, 3, 4, 5, 6, 7, or 8 payload molecules per antibody. In some embodiments, the DAR is from 1 to 30. In some embodiments, the DAR is from 1 to 24. In some embodiments, the DAR is from 1 to 16. In some embodiments, the DAR is from 1 to 8. In some embodiments, the DAR is from 1 to 6. In certain embodiments, the DAR is from 2 to 4. In some cases, the DAR is from 2 to 3. In certain cases, the DAR is from 0.5 to 3.5. In certain cases, the DAR is from 10 to 14. In certain cases, the DAR is from 14 to 18. In certain cases, the DAR is from 20 to 24.5. In some embodiments, the DAR is about 1, or about 1.5, or about 2, or about 2.5, or about 3, or about 3.5. In some embodiments, the DAR is 2. In some embodiments, the DAR is 4. In some embodiments, the DAR is 8. In some embodiments, the DAR is 12. In some embodiments, the DAR is 16. In some embodiments, the DAR is 24.

[0579] In one aspect, the present disclosure provides a method of producing a compound having a structure according to Formula (A):

[chemical structure]

[0580] wherein BA is an antibody or an antigen-binding fragment thereof;
[0581] Gln is a glutamine residue;
[0582] L1 is a first linker;
[0583] B is a branching unit comprising at least one adduct of a group B′ and a group B″;
[0584] L2 is a second linker covalently attached to the branching unit B via at least one group B″;
[0585] M is absent or

[chemical structure]

where R, R′, and R″ are independently at each occurrence hydrogen or a C₁-C₄ alkyl, or wherein R′ and R″ together form a 5-membered or a 6-membered ring;
[0586] Dxd is an anti-tumor agent comprising a structure according to Formula (P):

[chemical structure]

[0587] k and m are independently an integer from 1 to 12, and n is an integer from 1 to 30, wherein:
[0588] the method comprises the steps of:
   [0589] a) contacting, in the presence of a transglutaminase, the BA comprising at least one glutamine residue Gln (BA-Gln-NH₂) with a compound L1-B, wherein the branching unit B comprises the at least one group B′,
   [0590] b) contacting the product of step a) with k or more equivalents of a compound L2-(-M-Dxd)ₘ, wherein the linker L2 comprises at least one group B″, wherein one of the groups B′ and B″ is selected from —N₃ and

[chemical structure]

and the other of the groups B′ and B″ is selected from

[chemical structure]

where Q is C or N; and
[0591] c) isolating the produced compound of Formula (I).

[0592] In one aspect, the present disclosure provides a method of producing a compound having a structure according to Formula (A):

[chemical structure]

wherein BA is an antibody or an antigen-binding fragment thereof; Gln is a glutamine residue; L1 is a first linker as described above; B is a branching unit comprising at least one adduct of a group B′ and a group B″ as described above; L2 is a second linker as described above covalently attached to the branching unit B via at least one group B″ as described above; M is absent or

[chemical structure]

where R, R′, and R″ are as described above; Dxd is an anti-tumor agent comprising a structure according to Formula (P):

[chemical structure]

k and m are independently an integer from 1 to 12, and n is an integer from 1 to 30, wherein:
[0593] the method comprises the steps of:
   [0594] a) contacting a compound L1-B, wherein the branching unit B comprises the at least one group B′, with k or more equivalents of a compound L2-(-M-Dxd)ₘ, wherein the linker L2 comprises at least one group B″ capable of covalently binding with the group B′,
   [0595] wherein one of the groups B′ and B″ is selected from —N₃ and

[chemical structure]

and the other of the groups B′ and B″ is selected from

[chemical structure]

where Q is C or N;
[0596] thereby producting L1-B-(-L2-(-M-Dxd)ₘ)ₖ;
[0597] b) contacting, in the presence of a transglutaminase, the BA comprising at least one glutamine residue Gln (BA-Gln-NH₂) with the L1-B-(-L2-(-M-Dxd)ₘ)ₖ product of step a), and
[0598] c) isolating the produced compound of Formula (I).

[0599] In one aspect, the present disclosure provides a method of producing a compound having a structure according to Formula (I):

[chemical structure]

[0600] wherein BA is an antibody or an antigen-binding fragment thereof;
[0601] Gln is a glutamine residue;
[0602] L1 is a first linker;
[0603] B is a branching unit comprising at least one adduct of a group B′ and a group B″;
[0604] L2 is a second linker covalently attached to the branching unit B via at least one group B″;
[0605] M is absent or

[chemical structure]

where R, R′, and R″ are independently at each occurrence hydrogen or a C₁-C₄ alkyl, or wherein R′ and R″ together form a 5-membered or a 6-membered ring;
[0606] Dxd is an anti-tumor agent comprising a structure according to Formula (P):

[chemical structure]

[0607] k is an integer from 1 to 12, and n is an integer from 1 to 30, wherein:
[0608] the method comprises the steps of:
   [0609] a) contacting, in the presence of a transglutaminase, the BA comprising at least one glutamine residue Gln (BA-Gln-NH₂) with a compound L1-B, wherein the branching unit B comprises the at least one group B′,
   [0610] b) contacting the product of step a) with k or more equivalents of a compound L2-M-Dxd, wherein the linker L2 comprises the at least one group B″ capable of covalently attaching to the group B′,
[0611] wherein one of the groups B′ and B″ is selected from —N₃ and

[chemical structure]

and the other of the groups B′ and B″ is selected from

[chemical structure]

where Q is C or N; and
   [0612] c) isolating the produced compound of Formula (I).

[0613] In one aspect, the present disclosure provides a method of producing a compound having a structure according to Formula (I):

BA-(Gln-NH-L1-B-(-L2-M-Dxd)ₖ)ₙ (1),

wherein BA is an antibody or an antigen-binding fragment thereof; Gln is a glutamine residue; L1 is a first linker as described above; B is a branching unit comprising at least one adduct of a group B′ and a group B″ as described above; L2 is a second linker as described above covalently attached to the branching unit B via at least one group B″ as described above; M is absent or

[chemical structure]

where R, R′, and R″ are as described above; Dxd is an anti-tumor agent comprising a structure according to Formula (P):

[chemical structure]

k is an integer from 1 to 12, and n is an integer from 1 to 30, wherein:
[0614] the method comprises the steps of:
   [0615] a) contacting a compound L1-B, wherein the branching unit B comprises the at least one group B′ with k or more equivalents of a compound L2-M-Dxd, wherein the linker L2 comprises at least one group B″, thereby producting L1-B-(-L2-M-Dxd)ₖ, wherein one of the groups B′ and B″ is selected from —N₃ and

[chemical structure]

and the other of the groups B′ and B″ is selected from

[chemical structure]

where Q is C or N;
[0616] b) contacting, in the presence of a transglutaminase, the binding agent BA comprising at least one glutamine residue Gln (BA-Gln-NH₂) with the L1-B-(-L2-M-Dxd)ₖ product of step a), and
[0617] c) isolating the produced compound of Formula (I).

[0618] In one aspect, the present disclosure provides a method of producing a compound having a structure according to Formula (III):

[chemical structure]

[0619] wherein BA is an antibody or an antigen-binding fragment thereof; Gln is a glutamine residue; L2′-P is H₂N-SP1-B2-(-SP2-AA-SP3-M-Dxd)p as described above, and n is an integer from 1 to 30;
[0620] SP1 is absent or a first spacer unit selected from the group consisting of

[chemical structure]

[0621] B2 is absent or a branching unit;
[0622] SP2 is absent or a second spacer unit selected from the group consisting of a C₁₋₆ alkyl, —(CH₂—CH₂—O)ᵥ—, —NH—, —C(O)—, —NH—C(O)—, —NH—(CH₂)ᵤ—, —NH—(CH₂)˜-C(O)—, —NH—(CH₂—CH₂—O)ᵥ—, —NH—(CH₂—CH₂—O)ᵥ—C(O)—, —NH—(CH₂—CH₂—O)ᵥ—(CH₂)ᵤ—, —NH—(CH₂—CH₂—O)ᵥ—(CH₂)˜-C(O)—, —(CH₂)ᵤ—NH—C(O)—, —NH—(CH₂)ᵤ—NH—C(O)—, —NH—(CH₂)˜-C(O)—NH—, or combinations thereof; wherein subscripts u and v are independently an integer from 1 to 8;
[0623] AA is absent or a peptide unit comprising from 2 to 4 amino acids;
[0624] SP3 is absent or a third spacer unit selected from the group consisting of,

[chemical structure]

wherein R_{c} is independently at each occurrence absent or a group selected from

[chemical structure]

[0625] M is absent or

[chemical structure]

where R, R′, and R″ are independently at each occurrence hydrogen or a C₁-C₄ alkyl, or wherein R′ and R″ together form a 5-membered or a 6-membered ring; and
[0626] Dxd is an anti-tumor agent having a structure according to Formula (P):

[chemical structure]

[0627] p is an integer from 1 to 30;
[0628] wherein the method comprises the steps of:
   [0629] b) contacting, in the presence of a transglutaminase, the BA comprising at least one glutamine residue Gln (BA-Gin-NH₂) with the L2′-P, and
   [0630] c) isolating the produced compound of Formula (III).

[0631] In one aspect, the present disclosure provides a method of producing a compound having a structure according to Formula (I):

[chemical structure]

wherein BA is an antibody or an antigen-binding fragment thereof; Gln is a glutamine residue; L1 is a first linker as described above; B is a branching unit comprising at least one group B′ as described above; L2 is a second linker as described above covalently attached to the branching unit B via at least one group B″ as described above, wherein the group B′ and the group B″ form the at least one adduct as described above; M is absent or

[chemical structure]

where R, R′, and R″ are as described above; Dxd is an anti-tumor agent comprising a structure according to Formula (P):

[chemical structure]

k is an integer from 1 to 12, and n is an integer from 1 to 30, wherein:
[0632] the method comprises the steps of:
   [0633] a) contacting, in the presence of a transglutaminase, the binding agent BA comprising at least one glutamine residue Gln (BA-Gin-NH₂) with a compound L1-B, wherein the branching unit B comprises the at least one group B′ selected from —N₃,

[chemical structure]

thereby producing BA-Gin-NH-L1-B;
[0634] contacting e product of step a) with k or more equivalents of a compound L2-M-Dxd, wherein the linker L2 comprises at least one group B″ capable of covalently binding with the group B′, and
[0635] c) isolating the produced compound of Formula (I).

[0636] In another aspect, the present disclosure provides a method of producing a compound having a structure according to Formula (I):

[chemical structure]

wherein BA is an antibody or an antigen-binding fragment thereof; Gln is a glutamine residue; L1 is a first linker as described above; B is a branching unit comprising at least one group B′ as described above; L2 is a second linker as described above covalently attached to the branching unit B via at least one group B″ as described above, wherein the group B′ and the group B″ form the at least one adduct as described above; M is absent or

[chemical structure]

where R, R′, and R″ are as described above; Dxd is an anti-tumor agent comprising a structure according to Formula (P):

[chemical structure]

k is an integer from 1 to 12, and n is an integer from 1 to 30, wherein:
[0637] the method comprises the steps of:
   [0638] a) contacting a compound L1-B, wherein the branching unit B comprises the at least one group B′ selected from —N₃,

[chemical structure]

with k or more equivalents of a compound L2-M-Dxd, wherein the linker L2 comprises at least one group B″ capable of covalently binding with the group B′, thereby producting L1-B-(-L2-M-Dxd)ₖ;
[0639] b) contacting, in the presence of a transglutaminase, the binding agent BA comprising at least one glutamine residue Gln (BA-Gln-NH₂) with the L1-B-(-L2-M-Dxd)ₖ product of step a), and
[0640] c) isolating the produced compound of Formula (I).

[0641] In one embodiment, the glutamine residue Gln is naturally present in a CH₂ or CH₃ domain of the BA. In another embodiment, the glutamine residue Gln is introduced to the BA by modifying one or more amino acids. In one embodiment, the Gln is Q295 or N297Q.

[0642] In one embodiment, the transglutaminase is microbial transglutaminase (MTG). In one embodiment, the transglutaminase is bacterial transglutaminase (BTG).

[0643] In one embodiment, M is absent. In another embodiment, M-Dxd is has a structure selected from the group consisting of

[chemical structure]

wherein R is a hydrogen or a C₁-C₄ alkyl, and where [symbol] represents the point of attachment to L2.

[0644] In one embodiment, the compound L2-Dxd has a structure selected from the group consisting of:

[chemical structure]

[chemical structure]

[chemical structure]

[chemical structure]

[chemical structure]

[chemical structure]

or a pharmaceutically acceptable salt thereof.

[0645] In one embodiment, the compound L2-Dxd encompasses an optional branching unit B2. In such embodiments, the compound L2-Dxd comprises 2 or more Dxd units.

[0646] In one embodiment, the branching unit B2 has a structure selected from the group consisting of:

[chemical structure]

[0647] In one embodiment, the compound L2-Dxd has a structure selected from the group consisting of:

[chemical structure]

[chemical structure]

[chemical structure]

[chemical structure]

[chemical structure]

[chemical structure]

or a pharmaceutically acceptable salt thereof.

### Therapeutic Formulation and Administration

[0648] The present disclosure provides pharmaceutical compositions comprising the protein-drug conjugates of the present disclosure.

[0649] In one aspect, the present disclosure provides compositions comprising a population of protein-drug conjugates according to the present disclosure having a drug-antibody ratio (DAR) of about 0.5 to about 30.0.

[0650] In one embodiment, the composition has a DAR of about 1.0 to about 2.5.

[0651] In one embodiment, the composition has a DAR of about 2.

[0652] In one embodiment, the composition has a DAR of about 3.0 to about 4.5.

[0653] In one embodiment, the composition has a DAR of about 4.

[0654] In one embodiment, the composition has a DAR of about 6.5 to about 8.5.

[0655] In one embodiment, the composition has a DAR of about 8.

[0656] In one embodiment, the composition has a DAR of about 10 to about 14.

[0657] In one embodiment, the composition has a DAR of about 12.

[0658] In one embodiment, the composition has a DAR of about 14 to about 18.

[0659] In one embodiment, the composition has a DAR of about 16.

[0660] In one embodiment, the composition has a DAR of about 20 to about 24.5.

[0661] In one embodiment, the composition has a DAR of about 24.

[0662] The compositions of the disclosure are formulated with suitable carriers, excipients, and other agents that provide improved transfer, delivery, tolerance, and the like. A multitude of appropriate formulations can be found in the formulary known to all pharmaceutical chemists: Remington's Pharmaceutical Sciences, Mack Publishing Company, Easton, PA. These formulations include, for example, powders, pastes, ointments, jellies, waxes, oils, lipids, lipid (cationic or anionic) containing vesicles (such as LIPOFECTIN™, Life Technologies, Carlsbad, CA), DNA conjugates, anhydrous absorption pastes, oil-in-water and water-in-oil emulsions, emulsions carbowax (polyethylene glycols of various molecular weights), semi-solid gels, and semi-solid mixtures containing carbowax. See also Powell et al. “Compendium of excipients for parenteral formulations” PDA (1998) J Pharm Sci Technol 52:238-311.

[0663] The dose of a protein-drug conjugate administered to a patient may vary depending upon the age and the size of the patient, target disease, conditions, route of administration, and the like. The suitable dose is typically calculated according to body weight or body surface area. When a protein-drug conjugate of the present disclosure is used for therapeutic purposes in an adult patient, it may be advantageous to intravenously administer the protein-drug conjugate of the present disclosure normally at a single dose of about 0.01 to about 20 mg/kg body weight, more preferably about 0.02 to about 7, about 0.03 to about 5, or about 0.05 to about 3 mg/kg body weight. Depending on the severity of the condition, the frequency and the duration of the treatment can be adjusted. Effective dosages and schedules for administering a protein-drug conjugate may be determined empirically; for example, patient progress can be monitored by periodic assessment, and the dose adjusted accordingly. Moreover, interspecies scaling of dosages can be performed using well-known methods in the art (e.g., Mordenti et al., 1991, Pharmaceut. Res. 8:1351).

[0664] Various delivery systems are known and can be used to administer the pharmaceutical composition of the disclosure, e.g., encapsulation in liposomes, microparticles, microcapsules, recombinant cells capable of expressing the mutant viruses, receptor mediated endocytosis (see, e.g., Wu et al., 1987, J. Biol. Chem. 262:4429-4432). Methods of introduction include, but are not limited to, intradermal, intramuscular, intraperitoneal, intravenous, subcutaneous, intranasal, epidural, and oral routes. The composition may be administered by any convenient route, for example by infusion or bolus injection, by absorption through epithelial or mucocutaneous linings (e.g., oral mucosa, rectal and intestinal mucosa, etc.) and may be administered together with other biologically active agents. Administration can be systemic or local.

[0665] A pharmaceutical composition of the present disclosure can be delivered subcutaneously or intravenously with a standard needle and syringe. In addition, with respect to subcutaneous delivery, a pen delivery device readily has applications in delivering a pharmaceutical composition of the present disclosure. Such a pen delivery device can be reusable or disposable. A reusable pen delivery device generally utilizes a replaceable cartridge that contains a pharmaceutical composition. Once all of the pharmaceutical composition within the cartridge has been administered and the cartridge is empty, the empty cartridge can readily be discarded and replaced with a new cartridge that contains the pharmaceutical composition. The pen delivery device can then be reused. In a disposable pen delivery device, there is no replaceable cartridge. Rather, the disposable pen delivery device comes prefilled with the pharmaceutical composition held in a reservoir within the device. Once the reservoir is emptied of the pharmaceutical composition, the entire device is discarded.

[0666] Numerous reusable pen and autoinjector delivery devices have applications in the subcutaneous delivery of a pharmaceutical composition of the present disclosure. Examples include, but are not limited to AUTOPEN™ (Owen Mumford, Inc., Woodstock, UK), DISETRONIC™ pen (Disetronic Medical Systems, Bergdorf, Switzerland), HUMALOG MIX 75/25™ pen, HUMALOG™ pen, HUMALIN 70/30™ pen (Eli Lilly and Co., Indianapolis, IN), NOVOPEN™ I, II and III (Novo Nordisk, Copenhagen, Denmark), NOVOPEN JUNIOR™ (Novo Nordisk, Copenhagen, Denmark), BD™ pen (Becton Dickinson, Franklin Lakes, NJ), OPTIPEN™ OPTIPEN PRO™, OPTIPEN STARLET™, and OPTICLIK™ (Sanofi-Aventis, Frankfurt, Germany), to name only a few. Examples of disposable pen delivery devices having applications in subcutaneous delivery of a pharmaceutical composition of the present disclosure include, but are not limited to the SOLOSTAR™ pen (Sanofi-Aventis), the FLEXPEN™ (Novo Nordisk), and the KWIKPEN™ (Eli Lilly), the SURECLICK™ Autoinjector (Amgen, Thousand Oaks, CA), the PENLET™ (Haselmeier, Stuttgart, Germany), the EPIPEN (Dey, L. P.), and the HUMIRA™ Pen (Abbott Labs, Abbott Park IL), to name only a few.

[0667] In certain situations, the pharmaceutical composition can be delivered in a controlled release system. In one embodiment, a pump may be used (see Langer, supra; Sefton, 1987, CRC Crit. Ref. Biomed. Eng. 14:201). In another embodiment, polymeric materials can be used; see, Medical Applications of Controlled Release, Langer and Wise (eds.), 1974, CRC Pres., Boca Raton, Florida. In yet another embodiment, a controlled release system can be placed in proximity of the composition's target, thus requiring only a fraction of the systemic dose (see, e.g., Goodson, 1984, in Medical Applications of Controlled Release, supra, vol. 2, pp. 115-138). Other controlled release systems are discussed in the review by Langer, 1990, Science 249:1527-1533.

[0668] The injectable preparations may include dosage forms for intravenous, subcutaneous, intracutaneous and intramuscular injections, drip infusions, etc. These injectable preparations may be prepared by methods publicly known. For example, the injectable preparations may be prepared, e.g., by dissolving, suspending or emulsifying the antibody or its salt described above in a sterile aqueous medium or an oily medium conventionally used for injections. As the aqueous medium for injections, there are, for example, physiological saline, an isotonic solution containing glucose and other auxiliary agents, etc., which may be used in combination with an appropriate solubilizing agent such as an alcohol (e.g., ethanol), a polyalcohol (e.g., propylene glycol, polyethylene glycol), a nonionic surfactant [e.g., polysorbate 80, HCO-50 (polyoxyethylene (50 mol) adduct of hydrogenated castor oil)], etc. As the oily medium, there are employed, e.g., sesame oil, soybean oil, etc., which may be used in combination with a solubilizing agent such as benzyl benzoate, benzyl alcohol, etc. The injection thus prepared is preferably filled in an appropriate ampoule.

[0669] Advantageously, the pharmaceutical compositions for oral or parenteral use described above are prepared into dosage forms in a unit dose suited to fit a dose of the active ingredients. Such dosage forms in a unit dose include, for example, tablets, pills, capsules, injections (ampoules), suppositories, etc. The amount of the aforesaid antibody contained is generally about 5 to about 500 mg per dosage form in a unit dose; especially in the form of injection, it is preferred that the aforesaid antibody is contained in about 5 to about 100 mg and in about 10 to about 250 mg for the other dosage forms.

### Therapeutic Uses of the Protein-Drug Conjugates, Linker-Payloads and Payloads

[0670] In another aspect, the protein-drug conjugates, e.g., ADCs, disclosed herein are useful, inter alia, for the treatment, prevention and/or amelioration of a disease, disorder or condition in need of such treatment.

[0671] In one embodiment, the present invention provides a method of treating a condition in a subject in need thereof comprising administering to the subject a therapeutically effective amount of a compound (e.g., an antibody-drug conjugate, a linker-payload and/or a payload) according to the disclosure, or the composition comprising any compound according to the present disclosure.

[0672] In one embodiment, the protein-drug conjugates, e.g., ADCs, disclosed herein are useful for treating cancer. In one embodiment, the protein-drug conjugates, e.g., ADCs, disclosed herein are useful for treating a cancer selected from the group consisting of breast cancer, ovarian cancer, prostate cancer, lung cancer, liver cancer, or brain cancer. In one embodiment, the protein-drug conjugates, e.g., ADCs, disclosed herein are useful for treating HER2+ breast cancer. In one embodiment, the protein-drug conjugates, e.g., ADCs, disclosed herein are useful for treating prostate cancer.

[0673] In one aspect, the present disclosure provides a method of selectively delivering a compound into a cell. In one embodiment, the method of selectively delivering a compound into a cell comprises linking the compound to a targeted antibody. In one embodiment, the compound is a payload as described above. In one embodiment, the cell is a mammalian cell. In one embodiment, the cell is a human cell. In one embodiment, the cell is a cancer cell. In one embodiment, the cancer cell is selected from the group consisting of a breast cancer cell, an ovarian cancer cell, a prostate cancer cell, a lung cancer cell, a liver cancer cell, or a brain cancer cell.

[0674] In certain embodiments, the present disclosure provides a method of selectively delivering into a cell a compound having the structure P-I:

[chemical structure]

wherein R₁, R₂, and R₃, and R₄ are independently a hydrogen or an alkyl, e.g., a C₁-C₁₂ alkyl, or a C₁-C₈ alkyl, or a C₁-C₆ alkyl, or a C₁-C₄ alkyl, or wherein R₂ and R₃ together form a 5-membered or a 6-membered ring, or a pharmaceutically acceptable salt thereof.

[0675] In one aspect, the present disclosure provides a method of selectively targeting an antigen on a surface of a cell with a compound. In one embodiment, the method of selectively targeting an antigen on a surface of a cell with a compound comprises linking the compound to a targeted antibody. In one embodiment, the compound is a payload as described above. In one embodiment, the cell is a mammalian cell. In one embodiment, the cell is a human cell. In one embodiment, the cell is a cancer cell. In one embodiment, the cancer cell is selected from the group consisting of a breast cancer cell, an ovarian cancer cell, a prostate cancer cell, a lung cancer cell, a liver cancer cell, or a brain cancer cell.

[0676] In certain embodiments, the present disclosure provides a method of selectively targeting an antigen on a surface of a cell with a compound having the structure P-I:

[chemical structure]

wherein R₁, R₂, and R₃, and R₄ are independently a hydrogen or an alkyl, e.g., a C₁-C₁₂ alkyl, or a C₁-C₈ alkyl, or a C₁-C₆ alkyl, or a C₁-C₄ alkyl, or wherein R₂ and R₃ together form a 5-membered or a 6-membered ring, or a pharmaceutically acceptable salt thereof.

### Anti-HER2 Antibody-Drug Conjugates

[0677] In certain embodiments, the protein-drug conjugates, e.g., ADCs, disclosed herein are useful, inter alia, for the treatment, prevention and/or amelioration of any disease or disorder associated with or mediated by HER2 expression or activity, or treatable by binding HER2 without competing against modified LDL, or and/or promoting HER2 receptor internalization and/or decreasing cell surface receptor number.

[0678] The protein-drug conjugates of the present disclosure (and therapeutic compositions comprising the same) are useful, inter alia, for treating any disease or disorder in which stimulation, activation and/or targeting of an immune response would be beneficial. In particular, the anti-HER2 protein-drug conjugates, including both monospecific anti-HER2 antibodies and bispecific anti-HER2/HER2 antibodies of the present disclosure can be used for the treatment, prevention and/or amelioration of any disease or disorder associated with or mediated by HER2 expression or activity or the proliferation of HER2+ cells. The mechanism of action by which the therapeutic methods of the present disclosure are achieved include killing of the cells expressing HER2 in the presence of effector cells, for example, by CDC, apoptosis, ADCC, phagocytosis, or by a combination of two or more of these mechanisms. Cells expressing HER2 which can be inhibited or killed using the protein-drug conjugates of the present disclosure include, for example, breast tumor cells.

[0679] In one embodiment, the protein-drug conjugates of the present disclosure (and therapeutic compositions and dosage forms comprising same) comprise a bispecific antigen-binding molecule comprising:
[0680] a first antigen-binding domain (D1); and
[0681] a second antigen-binding domain (D2);
[0682] wherein D1 specifically binds a first epitope of human HER2; and
[0683] wherein D2 specifically binds a second epitope of human HER2.

[0684] In one embodiment of the above, D1 and D2 do not compete with one another for binding to human HER2.

[0685] The protein-drug conjugates of the present disclosure can be used to treat, e.g., primary and/or metastatic tumors arising in the prostate, bladder, cervix, lung, colon, kidney, breast, pancreas, stomach, uterus, and/or ovary. In certain embodiments, the protein-drug conjugates of the present disclosure are used to treat one or more of the following cancers: prostate cancer, bladder cancer, cervical cancer, lung cancer, colon cancer, kidney cancer, breast cancer, pancreatic cancer, stomach cancer, uterine cancer, and ovarian cancer. According to certain embodiments of the present disclosure, the anti-HER2 antibodies or anti-HER2/HER2 bispecific antibodies are useful for treating a patient afflicted with a breast cancer cell that is IHC2+ or more. According to other related embodiments of the present disclosure, methods are provided comprising administering an anti-HER2 antibody or an anti-HER2/HER2 antibody as disclosed herein to a patient who is afflicted with a breast cancer cell that is IHC2+ or more. Analytic/diagnostic methods known in the art, such as tumor scanning, etc., can be used to ascertain whether a patient harbors a tumor that is castrate-resistant.

[0686] In certain embodiments, the present disclosure also includes methods for treating residual cancer in a subject. The term “residual cancer” means the existence or persistence of one or more cancerous cells in a subject following treatment with an anti-cancer therapy.

[0687] The protein-drug conjugates of the present disclosure (and therapeutic compositions comprising the same) are useful, inter alia, for treating any disease or disorder in which stimulation, activation and/or targeting of an immune response would be beneficial. In particular, protein-drug conjugates comprising the anti-HER2 antibodies or anti HER2/HER2 antibodies of the present disclosure can be used for the treatment, prevention and/or amelioration of any disease or disorder associated with or mediated by HER2 expression or activity or the proliferation of HER2+ cells. The mechanism of action by which the therapeutic methods of the present disclosure are achieved include killing of the cells expressing HER2 in the presence of effector cells, for example, by CDC, apoptosis, ADCC, phagocytosis, or by a combination of two or more of these mechanisms. Cells expressing HER2 which can be inhibited or killed using the protein-drug conjugates of the present disclosure include, for example, breast tumor cells.

[0688] According to certain aspects, the present disclosure provides methods for treating a disease or disorder associated with HER2 expression (e.g., breast cancer) comprising administering one or more of the anti-HER2 protein-drug conjugates or anti-HER2/HER2 bispecific protein-drug conjugates described elsewhere herein to a subject after the subject has been determined to have breast cancer (e.g., and IHC2+ breast cancer). For example, the present disclosure includes methods for treating breast cancer comprising administering protein-drug conjugate comprising an anti-HER2 antibody or antigen-binding molecule or an anti-HER2/HER2 bispecific antibody or antigen-binding molecule to a patient 1 day, 2 days, 3 days, 4 days, 5 days, 6 days, 1 week, 2 weeks, 3 weeks or 4 weeks, 2 months, 4 months, 6 months, 8 months, 1 year, or more after the subject has received hormone therapy (e.g., anti-androgen therapy).

[0689] In certain embodiments, the present disclosure also includes the use of an anti-HER2 antibody of the present disclosure in the manufacture of a medicament for the treatment of a disease or disorder (e.g., cancer) related to or caused by HER2-expressing cells. In one aspect, the present disclosure relates to a protein-drug conjugate comprising an anti-HER2 antibody or antigen-binding fragment or an anti-HER2/HER2 bispecific antibody or antigen-binding fragment, as disclosed herein, for use in medicine. In one aspect, the present disclosure relates to a compound comprising an antibody-drug conjugate (ADC) as disclosed herein, for use in medicine.

### Anti-STEAP2 Antibody-Drug Conjugates

[0690] In certain embodiments, the protein-drug conjugates, e.g., ADCs, disclosed herein are useful, inter alia, for the treatment, prevention and/or amelioration of any disease or disorder associated with or mediated by STEAP2 expression or activity, or treatable by binding STEAP2 without competing against modified LDL, or and/or promoting STEAP2 receptor internalization and/or decreasing cell surface receptor number.

[0691] The protein-drug conjugates of the present disclosure (and therapeutic compositions comprising the same) are useful, inter alia, for treating any disease or disorder in which stimulation, activation and/or targeting of an immune response would be beneficial. In particular, the anti-STEAP2 protein-drug conjugates of the present disclosure can be used for the treatment, prevention and/or amelioration of any disease or disorder associated with or mediated by STEAP2 expression or activity or the proliferation of STEAP2+ cells. The mechanism of action by which the therapeutic methods of the present disclosure are achieved include killing of the cells expressing STEAP2 in the presence of effector cells, for example, by CDC, apoptosis, ADCC, phagocytosis, or by a combination of two or more of these mechanisms. Cells expressing STEAP2 which can be inhibited or killed using the protein-drug conjugates of the present disclosure include, for example, prostate tumor cells.

[0692] The protein-drug conjugates of the present disclosure can be used to treat, e.g., primary and/or metastatic tumors arising in the prostate, bladder, cervix, lung, colon, kidney, breast, pancreas, stomach, uterus, and/or ovary. In certain embodiments, the protein-drug conjugates of the present disclosure are used to treat one or more of the following cancers: prostate cancer, bladder cancer, cervical cancer, lung cancer, colon cancer, kidney cancer, breast cancer, pancreatic cancer, stomach cancer, uterine cancer, and ovarian cancer. Analytic/diagnostic methods known in the art, such as tumor scanning, etc., can be used to ascertain whether a patient harbors a tumor that is castrate-resistant.

[0693] In certain embodiments, the present disclosure also includes methods for treating residual cancer in a subject. The term “residual cancer” means the existence or persistence of one or more cancerous cells in a subject following treatment with an anti-cancer therapy.

[0694] According to certain aspects, the present disclosure provides methods for treating a disease or disorder associated with STEAP2 expression (e.g., prostate cancer) comprising administering one or more of the anti-STEAP2 protein-drug conjugates described elsewhere herein to a subject after the subject has been determined to have prostate cancer. For example, the present disclosure includes methods for treating prostate cancer comprising administering protein-drug conjugate comprising an anti-STEAP2 antibody or antigen-binding molecule to a patient 1 day, 2 days, 3 days, 4 days, 5 days, 6 days, 1 week, 2 weeks, 3 weeks or 4 weeks, 2 months, 4 months, 6 months, 8 months, 1 year, or more after the subject has received hormone therapy (e.g., anti-androgen therapy).

[0695] In certain embodiments, the present disclosure also includes the use of an anti-STEAP2 antibody of the present disclosure in the manufacture of a medicament for the treatment of a disease or disorder (e.g., cancer) related to or caused by STEAP2-expressing cells. In one aspect, the present disclosure relates to a protein-drug conjugate comprising an anti-STEAP2 antibody or antigen-binding fragment, as disclosed herein, for use in medicine. In one aspect, the present disclosure relates to a compound comprising an antibody-drug conjugate (ADC) as disclosed herein, for use in medicine.

### Anti-MET Antibody-Drug Conjugates

[0696] In certain embodiments, the protein-drug conjugates, e.g., ADCs, disclosed herein are useful, inter alia, for the treatment, prevention and/or amelioration of any disease or disorder associated with or mediated by MET expression or activity, or treatable by binding MET without competing against modified LDL, or and/or promoting MET receptor internalization and/or decreasing cell surface receptor number.

[0697] The protein-drug conjugates of the present disclosure (and therapeutic compositions comprising the same) are useful, inter alia, for treating any disease or disorder in which stimulation, activation and/or targeting of an immune response would be beneficial. In particular, the anti-MET or anti MET/MET bispecific protein-drug conjugates of the present disclosure can be used for the treatment, prevention and/or amelioration of any disease or disorder associated with or mediated by MET expression or activity or the proliferation of MET+ cells. The mechanism of action by which the therapeutic methods of the present disclosure are achieved include killing of the cells expressing MET in the presence of effector cells, for example, by CDC, apoptosis, ADCC, phagocytosis, or by a combination of two or more of these mechanisms. Cells expressing MET which can be inhibited or killed using the protein-drug conjugates of the present disclosure include, for example, lung tumor cells.

[0698] The protein-drug conjugates of the present disclosure can be used to treat, e.g., primary and/or metastatic tumors arising in the prostate, bladder, cervix, lung, colon, kidney, breast, pancreas, stomach, uterus, and/or ovary. In certain embodiments, the protein-drug conjugates of the present disclosure are used to treat one or more of the following cancers: prostate cancer, bladder cancer, cervical cancer, lung cancer, colon cancer, kidney cancer, breast cancer, pancreatic cancer, stomach cancer, uterine cancer, and ovarian cancer. Analytic/diagnostic methods known in the art, such as tumor scanning, etc., can be used to ascertain whether a patient harbors a tumor that is castrate-resistant.

[0699] In certain embodiments, the present disclosure also includes methods for treating residual cancer in a subject. The term “residual cancer” means the existence or persistence of one or more cancerous cells in a subject following treatment with an anti-cancer therapy.

[0700] According to certain aspects, the present disclosure provides methods for treating a disease or disorder associated with MET expression (e.g., lung cancer) comprising administering one or more of the anti-MET or anti MET/MET bispecific protein-drug conjugates described elsewhere herein to a subject after the subject has been determined to have lung cancer. For example, the present disclosure includes methods for treating lung cancer comprising administering protein-drug conjugate comprising an anti-MET or anti MET/MET bispecific antibody or antigen-binding molecule to a patient 1 day, 2 days, 3 days, 4 days, 5 days, 6 days, 1 week, 2 weeks, 3 weeks or 4 weeks, 2 months, 4 months, 6 months, 8 months, 1 year, or more after the subject has received hormone therapy (e.g., anti-androgen therapy).

[0701] For example, anti-MET antibody-drug conjugates and MET×MET bispecific antibody-drug conjugates of the present disclosure are useful for the treatment of tumors that express (or overexpress) MET. For example, the anti-MET antibody-drug conjugates and MET×MET bispecific antibody-drug conjugates may be used to treat primary and/or metastatic tumors arising in the brain and meninges, oropharynx, lung and bronchial tree, gastrointestinal tract, male and female reproductive tract, muscle, bone, skin and appendages, connective tissue, spleen, immune system, blood forming cells and bone marrow, liver and urinary tract, and special sensory organs such as the eye. In certain embodiments, the anti-MET antibody-drug conjugates and MET×MET bispecific antibody-drug conjugates are used to treat one or more of the following cancers: acute myelogenous leukemia, adult T-cell leukemia, astrocytomas, bladder cancer, breast cancer, cervical cancer, cholangiocarcinoma, chronic myeloid leukemia, colorectal cancer, endometrial cancer, esophageal cancer, gastric cancer (e.g., gastric cancer with MET amplification), glioblastomata, head and neck cancer (e.g., head and neck squamous cell carcinoma [HNSCC]), Kaposi's sarcoma, kidney cancer, leiomyosarcomas, liver cancer, lung cancer (e.g., non-small cell lung cancer [NSCLC]), lymphomas, malignant gliomas, malignant mesothelioma, melanoma, mesothelioma, MFH/fibrosarcoma, multiple myeloma, nasopharyngeal cancer, osteosarcoma, ovarian cancer, pancreatic carcinoma, prostate cancer, renal cell carcinoma, rhabdomyosarcoma, small cell lung cancer, synovial sarcoma, thyroid cancer, and Wilms' tumor.

[0702] In certain embodiments, the present disclosure also includes the use of an anti-MET antibody-drug conjugate or a MET×MET bispecific antibody-drug conjugate of the present disclosure in the manufacture of a medicament for the treatment of a disease or disorder (e.g., cancer) related to or caused by MET-expressing cells. In one aspect, the present disclosure relates to a protein-drug conjugate comprising an anti-MET antibody-drug conjugate or a MET×MET bispecific antibody-drug conjugate, as disclosed herein, for use in medicine. In one aspect, the present disclosure relates to a compound comprising an antibody-drug conjugate (ADC) as disclosed herein, for use in medicine.

### Combination Therapies and Formulations

[0703] The present disclosure provides methods which comprise administering a pharmaceutical composition comprising any of the exemplary protein-drug conjugates (e.g., antibody-drug conjugates), linker-payloads and payloads described herein in combination with one or more additional therapeutic agents. Exemplary additional therapeutic agents that may be combined with or administered in combination with protein-drug conjugates (e.g., antibody-drug conjugates), linker-payloads and payloads of the present disclosure include, e.g., a HER2 antagonist (e.g., an anti-HER2 antibody [e.g., trastuzumab] or a small molecule inhibitor of HER2 or an anti-HER2 antibody-drug conjugate, or an anti-HER2/HER2 bispecific antibody or an anti-HER2/HER2 bispecific antibody-drug conjugate), an EGFR antagonist (e.g., an anti-EGFR antibody [e.g., cetuximab or panitumumab] or small molecule inhibitor of EGFR [e.g., gefitinib or erlotinib]), an antagonist of another EGFR family member such as HER2/ErbB2, ErbB3 or ErbB4 (e.g., anti-ErbB2, anti-ErbB3 or anti-ErbB4 antibody or small molecule inhibitor of ErbB2, ErbB3 or ErbB4 activity), an antagonist of EGFRvIII (e.g., an antibody that specifically binds EGFRvIII), a cMET antagonist (e.g., an anti-cMET antibody), an IGF1R antagonist (e.g., an anti-IGF1R antibody), a B-raf inhibitor (e.g., vemurafenib, sorafenib, gDC-0879, PLX-4720), a PDGFR-a inhibitor (e.g., an anti-PDGFR-a antibody), a PDGFR-3 inhibitor (e.g., an anti-PDGFR-3 antibody), a VEGF antagonist (e.g., a VEGF-Trap, see, e.g., U.S. Pat. No. 7,087,411 (also referred to herein as a “VEGF-inhibiting fusion protein”), anti-VEGF antibody (e.g., bevacizumab), a small molecule kinase inhibitor of VEGF receptor (e.g., sunitinib, sorafenib or pazopanib)), a DLL4 antagonist (e.g., an anti-DLL4 antibody disclosed in US 2009/0142354), an Ang2 antagonist (e.g., an anti-Ang2 antibody disclosed in US 2011/0027286 such as H1H685P), a FOLH1 (PSMA) antagonist, a PRLR antagonist (e.g., an anti-PRLR antibody), a STEAP1 or STEAP2 antagonist (e.g., an anti-STEAP1 antibody or an anti-STEAP2 antibody), a TMPRSS2 antagonist (e.g., an anti-TMPRSS2 antibody), a MSLN antagonist (e.g., an anti-MSLN antibody), a CA9 antagonist (e.g., an anti-CA9 antibody), a uroplakin antagonist (e.g., an anti-uroplakin antibody), etc.

[0704] Other agents that may be beneficially administered in combination with the protein-drug conjugates (e.g., antibody-drug conjugates), linker-payloads and payloads of the disclosure include cytokine inhibitors, including small-molecule cytokine inhibitors and antibodies that bind to cytokines such as IL-1, IL-2, IL-3, IL-4, IL-5, IL-6, IL-8, IL-9, IL-11, IL-12, IL-13, IL-17, IL-18, or to their respective receptors. The pharmaceutical compositions of the present disclosure (e.g., pharmaceutical compositions comprising an anti-HER2, an anti-HER2/HER2 bispecific, an anti-MET, an anti-MET/MET bispecific, or an anti-STEAP2 protein-drug conjugate (e.g., antibody-drug conjugate as disclosed herein) may also be administered as part of a therapeutic regimen comprising one or more therapeutic combinations selected from “ICE”: ifosfamide (e.g., Ifex®), carboplatin (e.g., Paraplatin®), etoposide (e.g., Etopophos®, Toposar®, VePesid®, VP-16); “DHAP”: dexamethasone (e.g., Decadron®), cytarabine (e.g., Cytosar-U®, cytosine arabinoside, ara-C), cisplatin (e.g., Platinol®-AQ); and “ESHAP”: etoposide (e.g., Etopophos®, Toposar®, VePesid®, VP-16), methylprednisolone (e.g., Medrol®), high-dose cytarabine, cisplatin (e.g., Platinol®-AQ).

[0705] The present disclosure also includes therapeutic combinations comprising any of the protein-drug conjugates (e.g., antibody-drug conjugates), linker-payloads and payloads mentioned herein and an inhibitor of one or more of HER2, VEGF, Ang2, DLL4, EGFR, ErbB2, ErbB3, ErbB4, EGFRvIII, cMet, IGF1R, B-raf, PDGFR-α, PDGFR-β, FOLH1 (PSMA), PRLR, STEAP1, STEAP2, TMPRSS2, MSLN, CA9, uroplakin, or any of the aforementioned cytokines, wherein the inhibitor is an aptamer, an antisense molecule, a ribozyme, an siRNA, a peptibody, a nanobody or an antibody fragment (e.g., Fab fragment; F(ab′)2 fragment; Fd fragment; Fv fragment; scFv; dAb fragment; or other engineered molecules, such as diabodies, triabodies, tetrabodies, minibodies and minimal recognition units). The antigen-binding molecules of the disclosure may also be administered and/or co-formulated in combination with antivirals, antibiotics, analgesics, corticosteroids and/or NSAIDs. The antigen-binding molecules of the disclosure may also be administered as part of a treatment regimen that also includes radiation treatment and/or conventional chemotherapy.

[0706] The additional therapeutically active component(s) may be administered just prior to, concurrent with, or shortly after the administration of an antigen-binding molecule of the present disclosure; (for purposes of the present disclosure, such administration regimens are considered the administration of an antigen-binding molecule “in combination with” an additional therapeutically active component).

[0707] The present disclosure includes pharmaceutical compositions in which protein-drug conjugates (e.g., antibody-drug conjugates), linker-payloads and/or payloads of the present disclosure are co-formulated with one or more of the additional therapeutically active component(s) as described elsewhere herein.

### Administration Regimens

[0708] According to certain embodiments of the present disclosure, multiple doses of a protein-drug conjugate (e.g., an anti-HER2, an anti-HER2/HER2 bispecific, an anti-MET, an anti-MET/MET bispecific, or an anti-STEAP2 antibody-drug conjugate), linker-payload and/or a payload may be administered to a subject over a defined time course. The methods according to this aspect of the disclosure comprise sequentially administering to a subject multiple doses of a protein-drug conjugate (e.g., an anti-HER2, an anti-HER2/HER2 bispecific, an anti-MET, an anti-MET/MET bispecific, or an anti-STEAP2 antibody-drug conjugate), linker-payload and/or a payload of the disclosure. As used herein, “sequentially administering” means that each dose of a protein-drug conjugate (e.g., an anti-HER2, an anti-HER2/HER2 bispecific, an anti-MET, an anti-MET/MET bispecific, or an anti-STEAP2 antibody-drug conjugate), linker-payload and/or a payload is administered to the subject at a different point in time, e.g., on different days separated by a predetermined interval (e.g., hours, days, weeks or months). The present disclosure includes methods which comprise sequentially administering to the patient a single initial dose of a protein-drug conjugate (e.g., an anti-HER2, an anti-HER2/HER2 bispecific, an anti-MET, an anti-MET/MET bispecific, or an anti-STEAP2 antibody-drug conjugate), linker-payload and/or a payload, followed by one or more secondary doses of the protein-drug conjugate (e.g., an anti-HER2, an anti-HER2/HER2 bispecific, an anti-MET, an anti-MET/MET bispecific, or an anti-STEAP2 antibody-drug conjugate), linker-payload and/or payload, and optionally followed by one or more tertiary doses of the a protein-drug conjugate (e.g., an anti-HER2, an anti-HER2/HER2 bispecific, an anti-MET, an anti-MET/MET bispecific, or an anti-STEAP2 antibody-drug conjugate), linker-payload and/or payload.

[0709] The terms “initial dose,” “secondary doses,” and “tertiary doses,” refer to the temporal sequence of administration of the protein-drug conjugate (e.g., an anti-HER2, an anti-HER2/HER2 bispecific, an anti-MET, an anti-MET/MET bispecific, or an anti-STEAP2 antibody-drug conjugate), linker-payload and/or payload of the disclosure. Thus, the “initial dose” is the dose which is administered at the beginning of the treatment regimen (also referred to as the “baseline dose”); the “secondary doses” are the doses which are administered after the initial dose; and the “tertiary doses” are the doses which are administered after the secondary doses. The initial, secondary, and tertiary doses may all contain the same amount of the protein-drug conjugate (e.g., an anti-HER2, or an anti-HER2/HER2 bispecific, an anti-MET, an anti-MET/MET bispecific, or an anti-STEAP2 antibody-drug conjugate), linker-payload and/or payload, but generally may differ from one another in terms of frequency of administration. In certain embodiments, however, the amount of the protein-drug conjugate (e.g., an anti-HER2, an anti-HER2/HER2 bispecific, an anti-MET, an anti-MET/MET bispecific, or an anti-STEAP2 antibody-drug conjugate), linker-payload and/or payload contained in the initial, secondary and/or tertiary doses varies from one another (e.g., adjusted up or down as appropriate) during the course of treatment. In certain embodiments, two or more (e.g., 2, 3, 4, or 5) doses are administered at the beginning of the treatment regimen as “loading doses” followed by subsequent doses that are administered on a less frequent basis (e.g., “maintenance doses”).

[0710] In one exemplary embodiment of the present disclosure, each secondary and/or tertiary dose is administered 1 to 26 (e.g., 1, 1%, 2, 2%, 3, 3%, 4, 4%, 5, 5%, 6, 6%, 7, 7%, 8, 8%, 9, 9%, 10, 10%, 11, 11%, 12, 12%, 13, 13%, 14, 14%, 15, 15%, 16, 16%, 17, 17%, 18, 18%, 19, 19%, 20, 20%, 21, 21%, 22, 22%, 23, 23%, 24, 24%, 25, 25%, 26, 26%, or more) weeks after the immediately preceding dose. The phrase “the immediately preceding dose,” as used herein, means, in a sequence of multiple administrations, the dose of a protein-drug conjugate (e.g., an anti-HER2, an anti-HER2/HER2 bispecific, an anti-MET, an anti-MET/MET bispecific, or an anti-STEAP2 antibody-drug conjugate), linker-payload and/or payload which is administered to a patient prior to the administration of the very next dose in the sequence with no intervening doses.

[0711] The methods according to this aspect of the disclosure may comprise administering to a patient any number of secondary and/or tertiary doses of a protein-drug conjugate (e.g., an anti-HER2, an anti-HER2/HER2 bispecific, an anti-MET, an anti-MET/MET bispecific, or an anti-STEAP2 antibody-drug conjugate), linker-payload and/or payload. For example, in certain embodiments, only a single secondary dose is administered to the patient. In other embodiments, two or more (e.g., 2, 3, 4, 5, 6, 7, 8, or more) secondary doses are administered to the patient. Likewise, in certain embodiments, only a single tertiary dose is administered to the patient. In other embodiments, two or more (e.g., 2, 3, 4, 5, 6, 7, 8, or more) tertiary doses are administered to the patient.

[0712] In embodiments involving multiple secondary doses, each secondary dose may be administered at the same frequency as the other secondary doses. For example, each secondary dose may be administered to the patient 1 to 2 weeks after the immediately preceding dose. Similarly, in embodiments involving multiple tertiary doses, each tertiary dose may be administered at the same frequency as the other tertiary doses. For example, each tertiary dose may be administered to the patient 2 to 4 weeks after the immediately preceding dose. Alternatively, the frequency at which the secondary and/or tertiary doses are administered to a patient can vary over the course of the treatment regimen. The frequency of administration may also be adjusted during the course of treatment by a physician depending on the needs of the individual patient following clinical examination.

### EXAMPLES

[0713] The following examples illustrate specific aspects of the instant description. The examples should not be construed as limiting, as the examples merely provide specific understanding and practice of the embodiments and their various aspects.

### Abbreviations

| | |
|---|---|
| ADC | Antibody-drug conjugate |
| Aglycosylated | Antibody does not have any glycan |
| antibody | |
| aq. | Aqueous |
| Boc | N-tert-butoxycarbonyl |
| BupH | Thermo Scientific Prod# 28372, containing 100 |
| | mM sodium phosphate and 150 mM sodium chloride, |
| | potassium free, pH was adjusted from 7.2 |
| | to 7.6-7.8 MQ, unless otherwise noted. |
| COT | Cyclooctynol |
| Da | Dalton |
| DAR | Drug to antibody ratio |
| DCM | Dichloromethane |
| DIBAC | Dibenz[b,f]azocine, 11,12-didehydro-5,6-dihydro- |
| DIBAC-Suc | Dibenz[b,f]azocine-5(6H)-butanoic acid, 11,12-didehydro |
| DIBACT | 3H-Benzo[c]-1,2,3-triazolo[4,5-e][1]benzazocine, |
| | 8,9-dihydro- |
| DIPEA | Diisopropylethylamine |
| DMF | N,N-dimethylformamide |
| DMSO | Dimethylsulfoxide |
| ELSD | Evaporating light scattering detector |
| Equiv. | Equivalent |
| ESI | Electrospray ionization |
| g | Gram |
| GUL-azide | (((S)-5-(4-azidobutanamido)-1-carboxypentyl)car- |
| | bamoyl)-L-glutamic acid |
| HATU | 2-(7-Aza-1H-benzotriazole-1-yl)-1,1,3,3-tetrameth- |
| | yluronium hexafluorophosphate |
| HC | Heavy chain of immunoglobulin |
| HEK | Human embryonic kidney (cells) |
| HPLC | High performance liquid chromatography |
| hr or hrs | Hours |
| LC | Light chain of immunoglobulin |
| LC | Liquid chromatography |
| mg | milligrams |
| min | minutes |
| mL | milliliters |
| μL | microliters |
| mM | millimolar |
| μM | micromolar |
| MS | Mass spectrometry |
| MSD | Mass-selective detector |
| MW | Molecular weight |
| NHS | N-hydroxy succinimide |
| nM | nanomolar |
| NMR | Nuclear magnetic resonance |
| PAB | Para-aminobezyloxy(carbonyl) |
| PBS | 10 mM sodium phosphate buffer and 150 mM |
| | sodium chloride |
| PBSg | 10 mM phosphate, 150 mM sodium chloride, |
| | 5% glycerol |
| PEG | Polyethyleneglycol |
| ppm | Parts per million (chemical shift) |
| PPTS | pyridinium p-toluenesulfonate |
| RP | Reversed phase |
| RT | room temperature |
| Sat. | Saturated |
| SEC | Size exclusion chromatography |
| Suc | Succinic acid |
| MTBE | Tert-Butyl methyl ether |
| TEA | Triethylamine |
| TFA | Trifluoroacetic acid |
| TG | Transglutaminase |
| THF | Tetrahydrofuran |

[0715] Most starting materials were commercially available from Sigma-Aldrich®, J&K®, ChemExpress®, etc. The following compounds were synthesized according to corresponding references.

| Cpd# | Structure | CAS | Ref. |
|---|---|---|---|
| LP1-1 | [chemical structure] | 2226472-26-8 | WO2018089373 |
| LP2-1 | [chemical structure] | 1537170-85-6 | WO2018089373 |
| LP2-2 | [chemical structure] | 2226472-27-9 | WO2018089373 |
| LP2-3 | [chemical structure] | 2226472-28-0 | WO2018089373 |

### General Methods

### Example 1: Synthesis of Camptothecin Derivatives (Payloads)

TABLE 5
Exemplary camptothecin analog payloads P1-P4 according to the disclosure

| | | | | | | Purity | | |
|---|---|---|---|---|---|---|---|---|
| # | Name | Structures | cLogP | MF | MW | (%) | m/z | Salt |
| P1 | Exatecan | [chemical structure] | 1.45 | C₂₄H₂₂FN₃O₄. CH₄O₃S | 531.56 | 97 | 436.1 [M + H], 893.2 [2M + Na] | MsOH |
| P2 | Dxd | [chemical structure] | 0.55 | C₂₆H₂₄FN₃O₆ | 493.48 | 100 | 494.2 [M + H] | NA |
| P3 | | [chemical structure] | −0.60 | C₂₉H₃₀FN₅O₇. C₂HF₃O₂ | 693.59 | 97 | 580.2 [M + H], 1159.2 [2M + H] | TFA |
| P4 | | [chemical structure] | 0.02 | C₃₂H₃₄FN₅O₇ | 619.64 | 88 | 620.3 [M + H] | NA |

[0717] Payload P1, Exatecan mesylate, was commercially obtained from MCE. Payloads P2 and P3 were synthesized as described in WO2015155998, incorporated herein by reference, and camptothecin derivative payload P4 was synthesized as described in Scheme 1A and according to the synthetic steps outlined in Examples 1A-1 E:

[chemical structure]

[chemical structure]

### Example 1A: Synthesis of 9H-Fluoren-9-ylmethyl N-[2-(2-hydroxypyrrolidin-1-yl)-2-oxoethyl]carbamate (P4-2)

[chemical structure]

[0719] To a mixture of Fmoc-Gly-Pro-OH P4-1 (0.10 g, 0.26 mmol) in dry DMF (1 mL) was added lead tetraacetate (0.14 g, 0.31 mmol). The resulting mixture was stirred at RT for 30 minutes; reaction progress was monitored by LCMS. The resulting mixture was filtered through Celite, and the filtrate was diluted with ethyl acetate, washed with water and brine, dried over anhydrous sodium sulfate, and concentrated in vacuo. The residue was purified by silica gel column chromatography (0-10% ethyl acetate in petroleum ether) to give compound P4-2 (50 mg, 53% yield) as a white solid, and no acetate intermediate was obtained. ESI m/z: 389 (M+23)⁺. ¹H NMR (400 MHz, DMSO) δ 7.90 (d, J=7.4 Hz, 2H), 7.73 (d, J=7.5 Hz, 2H), 7.47-7.37 (m, 3H), 7.33 (t, J=7.3 Hz, 2H), 5.86 (br s, 1H), 5.48 (d, J=4.0 Hz, 0.25H), 5.39 (d, J=4.0 Hz, 0.75H), 4.33-4.18 (m, 3H), 3.96 (d, J=6.0 Hz, 1.5H), 3.75 (d, J=6.0 Hz, 0.5H), 3.59-3.33 (m, 1H), 3.22-3.11 (m, 1H), 2.00-1.59 (m, 4H) ppm.

### Example 1B: Synthesis of Benzyl 2-{[1-(2-{[(9H-fluoren-9-ylmethoxy)carbonyl]amino}acetyl) pyrrolidin-2-yl]oxy}acetate (P4-3)

[chemical structure]

[0721] To a solution of compound P4-2 (0.30 g, 0.82 mmol) in DCM (25 mL) was added chlorotrimethylsilane (TMSCl) (0.27 g, 2.5 mmol). The reaction mixture was stirred at RT for 3 hours; reaction progress was monitored by LCMS. The resulting mixture was concentrated in vacuo and the residue was diluted with DCM (25 mL). To the solution were added benzyl glycolate (0.27 g, 1.6 mmol) and DIPEA (0.21 g, 1.6 mmol), and the reaction mixture was stirred at RT for an hour; the completion of the reaction was monitored by LCMS. The resulting mixture was concentrated in vacuo and the residue was purified by reversed phase flash chromatography (0-100% acetonitrile in aq. ammonium bicarbonate (0.05%)) to give compound P4-3 (0.11 g, 25% yield, with purity >99% and 50 mg, with purity 75%) as a white solid. ESI m/z: 537.3 (M+Na)⁺. ¹H NMR (400 MHz, DMSO_{d6}) δ 7.91-7.89 (m, 2H), 7.74-7.69 (m, 2H), 7.63-7.48 (m, 1H), 7.42-7.25 (m, 9H), 5.51-5.09 (m, 2H), 4.35-4.21 (m, 5H), 4.00-3.77 (m, 2H), 3.52-3.38 (m, 2H), 3.30-3.18 (m, 1H), 2.19-1.64 (m, 4H) ppm.

### Example 1C: Synthesis of 2-{[1-(2-{[(9H-Fluoren-9-ylmethoxy)carbonyl]amino}acetyl)pyrrolidin-2-yl]oxy}acetic acid (P4-4)

[chemical structure]

[0723] To a solution of compound P4-3 (89 mg, 0.17 mmol) in methanol (3 mL) and THF (7 mL) was added wet palladium on carbon (10% Pd, 20 mg) under nitrogen protection. The mixture was degassed and stirred under hydrogen balloon pressure at RT for 2 hours, and the completion of the reaction was monitored by LCMS. The reaction mixture was filtered through Celite and the filtrate was concentrated in vacuo. The residue was purified by reversed phase flash chromatography (0-100% acetonitrile in aq. ammonium bicarbonate (0.05%)) to give compound P4-4 (36 mg, 49% yield) as a white solid. ESI m/z: 447.1 (M+Na)⁺.

### Example 1D: 9H-Fluoren-9-ylmethyl N-{2-[2-({[(10S,23S)-10-ethyl-18-fluoro-10-hydroxy-19-methyl-5,9-dioxo-8-oxa-4,15-diazahexacyclo[14.7.1.0²,¹⁴.0⁴,¹³.0⁶,¹¹.0²⁰,²⁴]tetracosa-1,6(11),12,14,16,18,20(24)-heptaen-23-yl]carbamoyl}methoxy)pyrrolidin-1-yl]-2-oxoethyl}carbamate (P4-5)

[chemical structure]

[0725] To a mixture of compound P4-4 (63 mg, 0.15 mmol) and Exatecan mesylate (66 mg, 0.12 mmol) in DMF (2 mL) were added HATU (61 mg, 0.16 mmol) and DIPEA (46 mg, 0.36 mmol), and the mixture was stirred at RT for 2 hours; reaction completion was monitored by LCMS. The reaction mixture was directly purified by reversed phase flash chromatography (0-100% acetonitrile in aq. ammonium bicarbonate (10 mM)) to give compound P4-5 (45 mg, 44% yield) as a yellow solid. ESI m/z: 842.3 (M+H)⁺.

### Example 1E: 2-{[1-(2-Aminoacetyl)pyrrolidin-2-yl]oxy}-N-[(10S,23S)-10-ethyl-18-fluoro-10-hydroxy-19-methyl-5,9-dioxo-8-oxa-4,15-diazahexacyclo[14.7.1.0²,¹⁴.0⁴,¹³.0⁶,¹¹.0²⁰,²⁴]tetracosa-1,6(11),12,14,16,18,20(24)-heptaen-23-yl]acetamide (P4)

[chemical structure]

[0727] To a solution of compound P4-5 (45 mg, 54 μmol) in DCM (4 mL) was added diethylamine (20 mg, 0.27 mmol), and the mixture was stirred at RT overnight. Reaction completion was monitored by LCMS. The reaction mixture was concentrated in vacuo and the residue was purified by silica gel flash chromatography (0-10% methanol in DCM) to give compound P4 (9.5 mg, 28% yield) as colorless oil. ESI m/z: 620.3 (M+H)⁺. Table 6, below, provides cytotoxicity and ADME (absorption, distribution, metabolism, and excretion) data for payloads P1-P3 according to the disclosure.

TABLE 6
Cytotoxicity and ADME results of Payloads.

[chemical structure]

| | | | HCT-15 | | | |
|---|---|---|---|---|---|---|
| | | Structures | IC₅₀ | Ratio to | IC₅₀ | Ratio to |
| # | Ref# | R | (nM) −v | MMAE −v | (nM) +v | MMAE +v |
| | MMAE | | 14.810 | 1x | 0.946 | 1x |
| P1 | Exatecan | H | 1.292 | 0.087x | 1.734 | 1.833x |
| P2 | Dxd | COCH₂OH | 6.995 | 0.472x | 2.654 | 2.805x |
| P3 | | [chemical structure] | 44.857 | 3.011x | 22.161 | 23.426x |

Here “−v” stands for without verapamil and “+v” stands for with verapamil.
Verapamil is a known inhibitor of P-glycoprotein and may function to block P-glycoprotein-modulated efflux.

### Example 2: Linker2-Payloads

### Example 2A: Linear Linker2-Payloads (LL2P)

TABLE 7
Structures of Linear Linker2-Payloads (LL2P)

| # | (P) | Structures |
|---|---|---|
| LP1 | P3 | [chemical structure] |
| LP2 | P3 | [chemical structure] |
| LP3 | P3 | [chemical structure] |
| LP4 | P3 | [chemical structure] |
| LP5 | P3 | [chemical structure] |
| LP6 | P3 | [chemical structure] |
| LP7 LP7′ | P4 | [chemical structure] |
| LP8 | P4 | [chemical structure] |
| LP9 | P3 | [chemical structure] |
| LP10 | P3 | [chemical structure] |
| LP11 | P3 | [chemical structure] |
| LP12 | P3 | [chemical structure] |
| LP13 | P3 | [chemical structure] |
| LP14 | \|P3 | [chemical structure] |
| LP15 | P3 | [chemical structure] |
| LP16 | P3 | [chemical structure] |
| LP17 | P3 | [chemical structure] |
| LP18 | P3 | [chemical structure] |
| LP19 | P3 | [chemical structure] |
| LP20 | P3 | [chemical structure] |
| LP21 | P3 | [chemical structure] |
| LP22 | P3 | [chemical structure] |

[0729] Table 8, below, provides the chemical properties of exemplary linear linker2-payloads (LL2P) according to the disclosure.

TABLE 8
Chemical properties of Linker2-Payloads (LL2P)

| | Linker | | | | | Purity | |
|---|---|---|---|---|---|---|---|
| # | name | Payloads | cLogP | MF | MW | (%) | m/z |
| LP1 | COT- | P3 | 0.72 | C₆₉H₉₀FN₁₁O₁₉•C₂HF₃O₂ | 1510.54 | 96 | 698.8 |
| | PEG4- | (Gly- | | | | | (M/2 + H) |
| | vcPAB | NHCH₂O- | | | | | |
| | | Dxd) | | | | | |
| LP2 | DIBAC- | P3 | 1.46 | C₇₈H₉₁FN₁₂O₁₉ | 1519.65 | 95* | 760.5 |
| | PEG4- | (Gly- | | | | | (M/2 + H) |
| | vcPAB | NHCH₂O- | | | | | |
| | | Dxd) | | | | | |
| LP3 | COT- | P3 | −1.84 | C₄₅H₅₁FN₈O₁₂ | 914.95 | 99 | 915.3 |
| | GGG | (Gly- | | | | | (M + H) |
| | | NHCH₂O- | | | | | |
| | | Dxd) | | | | | |
| LP4 | DIBAC- | P3 | 1.12 | C₆₁H₅₈FN₉O₁₂ | 1128.16 | 99 | 1128.4 |
| | GGF | (Gly- | | | | | (M + H) |
| | | NHCH₂O- | | | | | |
| | | Dxd) | | | | | |
| LP5 | COT- | P3 | −0.73 | C₅₆H₆₂FN₇O₁₉ | 1156.14 | 97 | 1156.3 |
| | EDA- | (Gly- | | | | | (M + H) |
| | (GLCA)PAB | NHCH₂O- | | | | | |
| | | Dxd) | | | | | |
| LP6 | COT- | P3 | −0.66 | C₅₆H₆₄FN₇O₁₈ | 1142.16 | >95 | 1143.3 |
| | EDA- | (Gly- | | | | | (M + H) |
| | (GLC)PAB | NHCH₂O- | | | | | |
| | | Dxd) | | | | | |
| LP7 | COT- | P4 | −1.23 | C₄₈H₅₅FN₈O₁₂ | 955.01 | >95* | 955.3 |
| LP7′ | GGG | (Gly-ProO- | | | | | (M + H) |
| | | Dxd) | | | | | |
| LP8 | DIBAC- | P4 | 1.77 | C₆₂H₆₈FN₇O₁₄ | 1154.24 | 99* | 592.1 |
| | PEG4 | (Gly-ProO- | | | | | (fragment) |
| | | Dxd) | | | | | |
| LP9 | COT-GGF | P3 | 0.38 | C₅₂H₅₇FN₈O₁₂ | 1005.1 | | 1005.0 |
| | | (Gly- | | | | | (M + H) |
| | | NHCH₂O- | | | | | |
| | | Dxd) | | | | | |
| LP10 | COT- | P3 | −0.73 | C₅₆H₆₂FN₇O₁₉ | 1156.1 | | 1156.3 |
| | PAB(GLCA) | (Gly- | | | | | (M + H) |
| | | NHCH₂O- | | | | | |
| | | Dxd) | | | | | |
| LP11 | COT- | P3 | −0.66 | C₅₆H₆₄FN₇O₁₈ | 1142.2 | | 1142.3 |
| | PAB(GLC) | (Gly- | | | | | (M + H) |
| | | NHCH₂O- | | | | | |
| | | Dxd) | | | | | |
| LP12 | COT- | P3 | −1.84 | C₅₈H₆₅FN₈O₂₀ | 1213.2 | | 607.4 |
| | PAB(GLCA)-G | (Gly- | | | | | (M/2 + H) |
| | | NHCH₂O- | | | | | |
| | | Dxd) | | | | | |
| LP13 | NH2- | P3 | −1.26 | C₅₅H₇₀FN₁₁O₁₅ | 1144.2 | | 573.0 |
| | PEG2- | (Gly- | | | | | (M/2 + H) |
| | vcPAB | NHCH₂O- | | | | | |
| | | Dxd) | | | | | |
| LP14 | NH2- | P3 | −4.41 | C₆₀H₇₇FN₁₂O₁₈ | 1273.3 | | 637.5 |
| | PEG2- | (Gly- | | | | | (M/2 + H) |
| | ^{D}EvcPAB | NHCH₂O- | | | | | |
| | | Dxd) | | | | | |
| LP15 | NH2- | P3 | −4.41 | C₆₀H₇₇FN₁₂O₁₈ | 1273.3 | | 637.4 |
| | PEG2- | (Gly- | | | | | (M/2 + H) |
| | ^{L}EvcPAB | NHCH₂O- | | | | | |
| | | Dxd) | | | | | |
| LP16 | NH2- | P3 | −1.35 | C₅₉H₇₈FN₁₁O₁₇ | 1232.3 | | 616.9 |
| | PEG4- | (Gly- | | | | | (M/2 + H) |
| | vcPAB | NHCH₂O- | | | | | |
| | | Dxd) | | | | | |
| LP17 | Mc(3)- | P3 | −2.01 | C₆₆H₈₃FN₁₂O₂₀ | 1383.5 | | 692.4 |
| | PEG4- | (Gly- | | | | | (M/2 + H) |
| | vcPAB-G- | NHCH₂O- | | | | | |
| | NHCH2- | Dxd) | | | | | |
| | Dxd | | | | | | |
| LP18 | | P3 | | | | | |
| | | (Gly- | | | | | |
| | | NHCH₂O- | | | | | |
| | | Dxd) | | | | | |
| LP19 | NH2- | P3 | −4.51 | C₆₄H₈₅FN₁₂O₂₀ | 1361.4 | | 681.5 |
| | PEG4- | (Gly- | | | | | (M/2 + H) |
| | ^{D}EvcPAB | NHCH₂O- | | | | | |
| | | Dxd) | | | | | |
| LP20 | COT- | P3 | −0.28 | C₇₄H₉₇FN₁₂O₂₂ | 1525.7 | | 763.5 |
| | PEG4- | (Gly- | | | | | (M/2 + H) |
| | ^{D}EvcPAB | NHCH₂O- | | | | | |
| | | Dxd) | | | | | |
| LP21 | NH2- | P3 | −4.51 | C₆₄H₈₅FN₁₂O₂₀ | 1361.4 | | 681.4 |
| | PEG4- | (Gly- | | | | | (M/2 + H) |
| | ^{L}EvcPAB | NHCH₂O- | | | | | |
| | | Dxd) | | | | | |
| LP22 | COT- | P3 | −0.28 | C₇₄H₉₇FN₁₂O₂₂ | 1525.7 | | 763.5 |
| | PEG4- | (Gly- | | | | | (M/2 + H) |
| | ^{L}EvcPAB | NHCH₂O- | | | | | |
| | | Dxd) | | | | | |

*Mixture of lactone and ring-opening products. Values of MW and m/z are data of the corresponding lactone.

### Example 2B: Branched Linker2-Payloads (BL2P)

[0730] Table 9, below, provides structures for exemplary branching units B1-B5 according to the disclosure.

TABLE 9
Structures of Branching Units B1-B5

| Branch B | Structure |
|---|---|
| B1 | [chemical structure] |
| B2 | [chemical structure] |
| B3 | [chemical structure] |
| B4 | [chemical structure] |
| B5 | [chemical structure] |

[0731] Table 10, below, provides structures for exemplary branched linker2-payloads (BL2P) according to the disclosure.

TABLE 10
Structures of Branched Linker2-Payloads (BL2P)

| | LP | | |
|---|---|---|---|
| # | name | cLogP | Structures |
| LP23 | COT- PEG4- CO- B1- (LP′)(LP″) LP′ = GGFG- NHCH2- Dxd LP″ = NH2- PEG4- GGFG- NHCH2- Dxd | −2.17 | [chemical structure] |
| LP24 | COT-B2- [NH- PEG2- vcPAB- G- NHCH2- Dxd]2 | −1.80 | [chemical structure] |
| LP25 | COT-B2- [NH- PEG2- ^{D}EvcPAB- G- NHCH2- Dxd]2 | −3.80 | [chemical structure] |
| LP26 | DIBAC- suc-B2- [NH- PEG4- vcPAB- G- NHCH2- Dxd]2 | −1.25 | [chemical structure] |
| LP27 | B3-[NH- PEG2- vcPAB- G- NHCH2- Dxd]2 | −4.22 | [chemical structure] |
| LP28 | COT-B3- [NH- PEG2- ^{D}EvcPAB- G- NHCH2- Dxd]2 | −4.15 | [chemical structure] |
| qLP29 | NH2- PEG3- TCOT- B3- [NH- PEG2- ^{D}EvcPAB- G- NHCH2- Dxd]2 | −8.21 | [chemical structure] |
| LP30 | DIBAC- suc-B3- [NH- PEG2- ^{D}EvcPAB- G- NHCH2- Dxd]2 | −3.41 | [chemical structure] |
| LP31 | B3-[NH- PEG2- ^{L}EvcPAB- G- NHCH2- Dxd]2 | −8.57 | [chemical structure] |
| LP32 | COT-B3- [NH- PEG2- ^{L}EvcPAB- G- NHCH2- Dxd]2 | −4.15 | [chemical structure] |
| qLP33 | NH2- PEG3- TCOT- B3- [NH- PEG2- ^{L}EvcPAB- G- NHCH2- Dxd]2 | −8.21 | [chemical structure] |
| LP34 | DIBAC- suc-B3- [NH- PEG2- ^{L}EvcPAB- G- NHCH2- Dxd]2 | −3.41 | [chemical structure] |
| LP35 | COT-B3- [NH- PEG2- GGFG- NHCH2- Dxd]2 | −4.94 | [chemical structure] |
| LP36 | COT-B4- [NH- PEG2- ^{D}EVCPAB- G- NHCH2- Dxd]2 | −3.59 | [chemical structure] |
| LP37 | COT-B4- [NH- PEG2- ^{L}EVCPAB- G- NHCH2- Dxd]2 | −3.59 | [chemical structure] |
| LP38 | COT- PEG2-B4- [NH- PEG2- ^{L}EVCPAB- G- NHCH2- Dxd]2 | −4.55 | [chemical structure] |
| LP39 | COT- PEG2-B4- [NH- ^{L}EVCPAB- G- NHCH2- Dxd]2 | −2.63 | [chemical structure] |
| qLP40 | NH2- PEG3- TCOT- PEG2- B4- [NH- ^{L}EVCPAB- G- NHCH2- Dxd]2 | −6.69 | [chemical structure] |
| LP41 | COT- PEG2- B5- [NH- PEG2- ^{L}EVCPAB- G- NHCH2- Dxd]3 | −6.84 | [chemical structure] |
| qLP42 | NH2- PEG3- TCOT- PEG2- B5- [NH- PEG2- ^{L}EVCPAB- G- NHCH2- Dxd]3 | −11.22 | [chemical structure] |

[0732] Table 11, below, provides the chemical properties of exemplary branched linker2-payloads (BL2P) according to the disclosure.

TABLE 11
Chemical properties of Branched Linker2-Payloads (BL2P)

| # | LP name | cLogP | MF | MW | Mass |
|---|---|---|---|---|---|
| LP23 | COT-PEG4-CO-B1- | −2.17 | C₁₃₂H₁₆₆F₂N₂₂O₃₅ | 2658.9 | 887.6 (M/3 + H) |
| | (LP1)(LP2) | | | | |
| | LP1 = GGFG-NHCH2-Dxd | | | | |
| | LP2 = NH2-PEG4-GGFG- | | | | |
| | NHCH2-Dxd | | | | |
| LP24 | COT-B2-[NH-PEG2-vcPAB- | −1.80 | C₁₂₄H₁₅₅F₂N₂₃O₃₄ | 2549.7 | 850.8 (M/3 + H) |
| | G-NHCH2-Dxd]2 | | | | |
| LP25 | COT-B2-[NH-PEG2- | −3.80 | C₁₃₄H₁₆₉F₂N₂₅O₄₀ | 2808.0 | 936.7 (M/3 + H) |
| | ^{D}EvcPAB-G-NHCH2-Dxd]2 | | | | |
| LP26 | DIBAC-suc-B2-[NH-PEG4- | −1.25 | C₁₄₁H₁₇₂F₂N₂₄O₃₈ | 2849.1 | 717.3 (M/4 + H) |
| | vcPAB-G-NHCH2-Dxd]2 | | | | (ring-open form) |
| | | | | | 950.2 (M/3 + H) |
| | | | | | (latone form) |
| LP27 | B3-[NH-PEG2-vcPAB-G- | −4.22 | C₁₂₂H₁₆₀F₂N₂₄O₃₅ | 2560.8 | 1280.9 (M/2 + H) |
| | NHCH2-Dxd]2 | | | | |
| LP28 | COT-B3-[NH-PEG2- | −4.15 | C₁₄₂H₁₈₆F₂N₂₆O₄₃ | 2983.2 | 995.2 (M/3 + H) |
| | ^{D}EvcPAB-G-NHCH2-Dxd]2 | | | | |
| qLP29 | NH2-PEG3-TCOT-B3-[NH- | −8.21 | C₁₅₀H₂₀₄F₂N₃₀O₄₆ | 3201.4 | 801.3 (M/4 + H), |
| | PEG2-^{D}EvcPAB-G-NHCH2- | | | | 1067.8 (M/3 + H) |
| | Dxd]2 | | | | |
| LP30 | DIBAC-suc-B3-[NH-PEG2- | −3.41 | C₁₅₁H₁₈₇F₂N₂₇O₄₃ | 3106.3 | 786.4 (M/4 + H) |
| | ^{D}EvcPAB-G-NHCH2-Dxd]2 | | | | (both ring-open); |
| | | | | | 781.8 (M/4 + H) |
| | | | | | (mono ring-open); |
| | | | | | 1036.2 (M/3 + H) |
| | | | | | (lactone) |
| LP31 | B3-[NH-PEG2-^{L}EvcPAB-G- | −8.57 | C₁₃₂H₁₇₄F₂N₂₆O₄₁ | 2819.0 | 940.5 (M/3 + H) |
| | NHCH2-Dxd]2 | | | | |
| LP32 | COT-B3-[NH-PEG2- | −4.15 | C₁₄₂H₁₈₆F₂N₂₆O₄₃ | 2983.2 | 995.5 (M/3 + H) |
| | ^{L}EvcPAB-G-NHCH2-Dxd]2 | | | | |
| qLP33 | NH2-PEG3-TCOT-B3-[NH- | −8.21 | C₁₅₀H₂₀₄F₂N₃₀O₄₆ | 3201.4 | 801.0 (M/4 + H) |
| | PEG2-^{L}EvcPAB-G-NHCH2- | | | | |
| | Dxd]2 | | | | |
| LP34 | DIBAC-suc-B3-[NH-PEG2- | −3.41 | C₁₅₁H₁₈₇F₂N₂₇O₄₃ | 3106.3 | 786.5 (M/4 + H) |
| | ^{L}EvcPAB-G-NHCH2-Dxd]2 | | | | (both ring-open), |
| | | | | | 1042.3 (M/3 + H) |
| | | | | | (mono ring-open), |
| | | | | | 1036.1 (M/3 + H) |
| | | | | | (lactone) |
| LP35 | COT-B3-[NH-PEG2-GGFG- | −4.94 | C₁₂₀H₁₄₈F₂N₂₀O₃₃ | 2436.6 | 812.7 (M/3 + H) |
| | NHCH2-Dxd]2 | | | | |
| LP36 | COT-B4-[NH-PEG2- | −3.59 | C₁₃₉H₁₇₉F₂N₂₅O₄₂ | 2910.1 | 970.8 (M/3 + H) |
| | ^{D}EVCPAB-G-NHCH2-Dxd]2 | | | | |
| LP37 | COT-B4-[NH-PEG2- | −3.59 | C₁₃₉H₁₇₉F₂N₂₅O₄₂ | 2910.1 | 970.6 (M/3 + H) |
| | ^{L}EVCPAB-G-NHCH2-Dxd]2 | | | | |
| LP38 | COT-PEG2-B4-[NH-PEG2- | −4.55 | C₁₅₀H₂₀₀F₂N₂₆O₄₇ | 3157.4 | 936.7 (M/3 + H) |
| | ^{L}EVCPAB-G-NHCH2-Dxd]2 | | | | |
| LP39 | COT-PEG2-B4-[NH- | −2.63 | C₁₃₂H₁₆₆F₂N₂₄O₃₉ | 2750.9 | 917.3 (M/3 + H) |
| | ^{L}EVCPAB-G-NHCH2-Dxd]2 | | | | |
| qLP40 | NH2-PEG3-TCOT-PEG2- | −6.69 | C₁₄₀H₁₈₄F₂N₂₈O₄₂ | 2969.2 | 991.2 (M/3 + H) |
| | B4-[NH-^{L}EVCPAB-G- | | | | |
| | NHCH2-Dxd]2 | | | | |
| LP41 | COT-PEG2-B5-[NH-PEG2- | −6.84 | C₂₁₀H₂₇₃F₃N₃₈O₆₅ | 4426.7 | 1107.6 (M/4 + H) |
| | ^{L}EVCPAB-G-NHCH2-Dxd]3 | | | | |
| qLP42 | NH2-PEG3-TCOT-PEG2- | −11.22 | C₂₁₈H₂₉₁F₃N₄₂O₆₈ | 4644.9 | 929.7 (M/5 + H), |
| | B5-[NH-PEG2-^{L}EVCPAB-G- | | | | 1161.9 (M/4 + H) |
| | NHCH2-Dxd]3 | | | | |

### Example 3: Synthesis of vcPAB-Carbamate Linker-Payloads

[0733] Linker-payloads LP1 and LP2 were synthesized as described in Scheme 2 and in Examples 3A-3C (for LP1) and 2D (for LP2), below. Starting materials L1-1 (CAS 2226472-26-8) and L2-3 (CAS 2226472-28-0) were synthesized according to WO2018089373A2, incorporated by reference herein in its entirety.

[chemical structure]

[chemical structure]

### Example 3A: N-[(1 S)-1-{[(1 S)-4-(Carbamoylamino)-1-{[4-(hydroxymethyl)phenyl]carbamoyl}butyl]carbamoyl}-2-methylpropyl]-1-[2-(cyclooct-2-yn-1-yloxy)acetamido]-3,6,9,12-tetraoxapentadecan-15-amide (L1-2)

[chemical structure]

[0735] To a solution of compound L1-1 (0.17 g, 0.33 mmol) in DMF (10 mL) were added DIPEA (0.13 g, 1.0 mmol) and vcPAB (0.13 g, 0.34 mmol) successively, and the reaction mixture was stirred at RT for an hour. Reaction completion was monitored by LCMS. The resulting mixture was directly purified by reversed phase flash chromatography (0-80% acetonitrile in water) to give compound L1-2 (0.18 g, 70% yield) as a colorless oil. ESI m/z: 791.3 (M+H)⁺. ¹H NMR (400 MHz, DMSO_{d6}) δ 9.91 (s, 1H), 8.11 (d, J=8.4 Hz, 1H), 7.89 (d, J=8.8 Hz, 1H), 7.61 (t, J=5.6 Hz, 1H), 7.55 (d, J=8.4 Hz, 2H), 7.23 (d, J=8.4 Hz, 2H), 5.98 (t, J=5.6 Hz, 1H), 5.42 (s, 2H), 5.10 (br s, 1H),), 4.43 (s, 2H), 4.39-4.37 (m, 1H), 4.30-4.21 (m, 2H), 3.87 (d, J=14.8 Hz, 1H), 3.75 (d, J=14.8 Hz, 1H), 3.62-3.58 (m, 2H), 3.50-3.46 (m, 12H), 3.43 (t, J=6.0 Hz, 2H), 3.27-3.22 (m, 2H), 3.06-2.92 (m, 2H), 2.41-2.32 (m, 2H), 2.26-2.05 (m, 3H), 1.99-1.66 (m, 6H), 1.62-1.55 (m, 3H), 1.44-1.35 (m, 3H), 0.89 (d, J=6.8 Hz, 3H), 0.83 (d, J=6.8 Hz, 3H) ppm.

### Example 3B: {4-[(2S)-5-(Carbamoylamino)-2-[(2S)-2-{1-[2-(cyclooct-2-yn-1-yloxy) acetamido]-3,6,9,12-tetraoxapentadecan-15-amido}-3-methylbutanamido]pentanamido] phenyl}methyl 4-nitrophenyl carbonate (L1-3)

[chemical structure]

[0737] A suspension of compound L1-2 (80 mg, 0.10 mmol), DMAP (12 mg, 0.10 mmol) and DIPEA (26 mg, 0.20 mmol) in dry DMF (5 mL) was stirred at RT for 10 minutes before the addition of bis(4-nitrophenyl) carbonate (61 mg, 0.20 mmol). The reaction mixture was stirred at RT for 2 hours. Reaction completion was monitored by LCMS. The resulting mixture was directly purified by reversed phase flash chromatography (0-80% acetonitrile in water) to give compound L1-3 (53 mg, 55% yield) as a white solid. ESI m/z: 956.3 (M+H)⁺.

### Example 3C: {4-[(2S)-5-(Carbamoylamino)-2-[(2S)-2-{1-[2-(cyclooct-2-yn-1-yloxy)acetamido]-3,6,9,12-tetraoxapentadecan-15-amido}-3-methylbutanamido]pentanamido]phenyl}methyl N-({[({[(10S,23S)-10-ethyl-18-fluoro-10-hydroxy-19-methyl-5,9-dioxo-8-oxa-4,15-diazahexacyclo[14.7.1.0²,¹⁴.0⁴,¹³.0⁶,¹¹.0²⁰,²⁴]tetracosa-1,6(11),12,14,16,18,20(24)-heptaen-23-yl]carbamoyl}methoxy)methyl]carbamoyl}methyl)carbamate (LP1)

[chemical structure]

[0739] To a yellow solution of compound L1-3 (16 mg, 17 μmol) and P3 (12 mg, 17 μmol) in dry DMF (2 mL) was added DIPEA (6.5 mg, 51 μmol), and the clear reaction solution was stirred at RT for 2 hours. Reaction completion was monitored by LCMS. The resulting mixture was directly purified by reversed phase flash chromatography (0-60% acetonitrile in aq. TFA (0.01%)) to give linker-payload LP1 (15 mg, 63% yield as TFA salt) as a white solid. ESI m/z: 698.8 (M/2+H)⁺. ¹H NMR (400 MHz, DMSO_{d6}) δ 9.99 (s, 1H), 8.80 (t, J=6.8 Hz, 1H), 8.50 (d, J=9.2 Hz, 1H), 8.12 (d, J=7.2 Hz, 1H), 7.87 (d, J=8.8 Hz, 1H), 7.79 (d, J=10.8 Hz, 1H), 7.62-7.58 (m, 3H), 7.42 (t, J=6.0 Hz, 1H), 7.31 (s, 1H), 7.28 (d, J=8.4 Hz, 2H), 6.53 (br s, 1H), 5.98 (t, J=5.2 Hz, 1H), 5.63-5.57 (m, 1H), 5.46-5.37 (m, 3H), 5.21 (s, 2H), 4.93 (s, 2H), 4.63 (d, J=6.4 Hz, 2H), 4.41-4.35 (m, 1H), 4.29-4.21 (m, 2H), 4.02 (s, 2H), 3.87 (d, J=14.4 Hz, 1H), 3.75 (d, J=14.8 Hz, 1H), 3.63-3.58 (m, 4H), 3.50-3.48 (m, 12H), 3.46-3.41 (m, 2H), 3.27-3.24 (m, 2H), 3.23-3.12 (m, 2H), 3.07-2.91 (m, 2H), 2.47-2.45 (m, 0.5H), 2.41-2.33 (m, 4.5H), 2.25-2.04 (m, 5H), 1.99-1.69 (m, 9H), 1.63-1.54 (m, 3H), 1.44-1.33 (m, 3H), 0.88-0.82 (m, 9H) ppm. (The proton of TFA was not observed). ¹⁹F NMR (376 MHz, DMSO_{d6}) δ −74 (TFA), −111 (Ar—F) ppm.

### Example 3D: {4-[(2S)-2-[(2S)-2-[1-(4-{2-Azatricyclo[10.4.0.0⁴,⁹]hexadeca-1(12),4(9),5,7,13,15-hexaen-10-yn-2-yl}-4-oxobutanamido)-3,6,9,12-tetraoxapentadecan-15-amido]-3-methylbutanamido]-5-(carbamoylamino)pentanamido]phenyl}methyl N-({[({[(10S,23S)-10-ethyl-18-fluoro-10-hydroxy-19-methyl-5,9-dioxo-8-oxa-4,15-diazahexacyclo [14.7.1.0²,¹⁴.0⁴,¹³.0⁶,¹¹.0²⁰,²⁴]tetracosa-1,6(11),12,14,16,18,20(24)-heptaen-23-yl]carbamoyl}methoxy)methyl]carbamoyl}methyl)carbamate (LP2)

[chemical structure]

[0741] Following the procedure to make LP1 except substituting L2-3 for L1-3, linker-payload LP2 (12 mg, 46% yield) was obtained as a mixture of the lactone product (LP2, pictured above) and the ring-opening product (LP2-RO, pictured below) as a white solid after purification by reversed phase flash chromatography (0-100% methanol in aq. ammonium bicarbonate (10 mM)).

[chemical structure]

[0742] Lactone LP2: HPLC purity: 67%, retention time: 7.41 min, ESI m/z: 507.3 (M/3+H)⁺, 760.5 (M/2+H)⁺; Ring-opening product LP2-RO: HPLC purity: 33%, retention time: 6.61 min, ESI m/z: 513.3 (M/3+H)⁺, 769.5 (M/2+H)⁺.

[0743] Lactone product and ring-opening product mixture ¹H NMR (400 MHz, DMSO_{d6}) δ 9.99 (s, 1H), 8.80 (t, J=6.4 Hz, 1H), 8.50 (d, J=8.8 Hz, 1H), 8.12 (d, J=7.2 Hz, 1H), 7.87 (d, J=8.4 Hz, 1H), 7.80-7.75 (m. 2H), 7.69-7.67 (m, 1H), 7.63-7.58 (m, 3H), 7.51-7.46 (m, 3H), 7.45-7.33 (m, 3H), 7.32-7.26 (m, 4H), 6.53 (s, 1H), 5.98 (t, J=6.0 Hz, 1H), 5.63-5.57 (m, 1H), 5.42 (s, 4H), 5.21 (s, 2H), 5.03 (d, J=14.0 Hz, 1H), 4.93 (s, 2H), 4.63 (d, J=6.8 Hz, 2H), 4.41-4.35 (m, 1H), 4.25-4.21 (m, 1H), 4.02 (s, 2H), 3.62-3.57 (m, 5H), 3.48-3.45 (m, 12H), 3.31-3.28 (m, 2H), 3.23-3.14 (m, 2H), 3.11-3.07 (m, 2H), 3.05-2.98 (m, 1H), 2.96-2.91 (m, 1H), 2.60-2.55 (m, 1H), 2.46-2.44 (m, 1H), 2.39 (s, 3H), 2.35-2.33 (m, 1H), 2.26-2.15 (m, 3H), 2.03-1.94 (m, 2H), 1.88-1.67 (m, 4H), 1.63-1.57 (m, 1H), 1.46-1.33 (m, 2H), 0.88-0.81 (m, 9H) ppm. ¹⁹F NMR (376 MHz, DMSO_{d6}) δ −111 ppm.

[0744] Linker-payloads LP16 and LP17 were synthesized as described in Scheme 3 and in Examples 3E-3F (for LP16) and 3G (for LP17), below.

[chemical structure]

### Example 3E: {4-[(2S)-2-[(2S)-2-Amino-3-methylbutanamido]-5-(carbamoylamino)pentanamido]phenyl}methyl N-({[({[(10S,23S)-10-ethyl-18-fluoro-10-hydroxy-19-methyl-5,9-dioxo-8-oxa-4,15-diazahexacyclo[14.7.1.0²,¹⁴.0⁴,¹³.0⁶,¹¹.0²⁰,²⁴]tetracosa-1,6(11),12,14,16,18,20(24)-heptaen-23-yl]carbamoyl}methoxy)methyl]carbamoyl}methyl) carbamate (LP16-1)

[chemical structure]

[0746] To a solution of payload P3 (0.11 g, 0.15 mmol) in DMF (2 mL) were added DIPEA (39 mg, 0.30 mmol) and Fmoc-vcPAB-PNP (CAS: 863971-53-3, 77 mg, 0.10 mmol), and the reaction mixture was stirred at room temperature for an hour until the mixture turned clear and P was totally consumed according to LCMS. The resulting solution was separated by reversed phase flash chromatography (0-70% acetonitrile in aq. TFA (0.01%)) to give Fmoc-LP16-1 (98 mg, ESI m/z: 494 (M_{DXD}+H)⁺, 714.2 (M−M_{DXD}+H)⁺ as a light yellow solid, which was dissolved in dry DMF (4.5 mL). To the solution was added diethylamine (0.5 mL) slowly, and the reaction mixture was stirred at room temperature for 2 hours until Fmoc was totally removed according to LCMS. The volatiles were removed in vacuo and the residue was purified by reversed phase flash chromatography (0-40% acetonitrile in aq. TFA (0.01%)) to give LP16-1 (TFA salt, 45 mg, 41% yield from P3). ESI m/z: 493.1 (M/2+H)⁺. ¹H NMR (400 MHz, DMSO_{d6}) δ 10.20 (s, 1H), 8.80 (t, J=6.8 Hz, 1H), 8.68 (d, J=7.6 Hz, 1H), 8.50 (d, J=8.8 Hz, 1H), 8.09-8.01 (m, 3H), 7.79 (d, J=10.8 Hz, 1H), 7.58 (d, J=8.4 Hz, 2H), 7.41 (t, J=6.0 Hz, 1H), 7.31 (s, 1H), 7.29 (d, J=8.4 Hz, 2H), 6.53 (s, 1H), 6.05 (t, J=5.6 Hz, 1H), 5.63-5.57 (m, 1H), 5.54-5.45 (m, 2H), 5.42-5.41 (m, 2H), 5.21 (s, 2H), 4.93 (s, 2H), 4.63 (d, J=6.4 Hz, 2H), 4.55-4.50 (m, 1H), 4.02 (s, 2H), 3.69-3.61 (m, 3H), 3.24-3.12 (m, 1H), 3.08-2.94 (m, 2H), 2.40 (s, 3H), 2.23-2.18 (m, 2H), 2.14-2.03 (m, 1H), 1.90-1.81 (m, 2H), 1.78-1.68 (m, 1H), 1.64-1.53 (m, 1H), 1.47-1.36 (m, 2H), 0.96 (d, J=3.2 Hz, 3H), 0.94 (d, J=3.2 Hz, 3H), 0.87 (t, J=7.6 Hz, 3H) ppm. (Proton of TFA was not revealed.) ¹⁹F NMR (376 MHz, DMSO_{d6}) δ at −111, −73 ppm.

### Example 3F: {4-[(2S)-2-[(2S)-2-(1-Amino-3,6,9,12-tetraoxapentadecan-15-amido)-3-methylbutanamido]-5-(carbamoylamino)pentanamido]phenyl}methyl N-({[({[(10S,23S)-10-ethyl-18-fluoro-10-hydroxy-19-methyl-5,9-dioxo-8-oxa-4,15-diazahexacyclo[14.7.1.0²,¹⁴.0⁴,¹³.0⁶,¹¹.0²⁰,²⁴]tetracosa-1,6(11),12,14,16,18,20(24)-heptaen-23-yl]carbamoyl}methoxy)methyl]carbamoyl}methyl)carbamate (LP16)

[chemical structure]

[0748] To a solution of LP16-1 (16 mg, 15 μmol) in anhydrous DMF (1 mL) was added DIPEA (4 mg, 29 μmol) until pH value between 8.0 and 9.0, and then a solution of compound If (CAS 1314378-14-7, 9 mg, 15 μmol) in anhydrous DMF (1 mL) was added into the reaction solution. The mixture was stirred at room temperature for an hour until starting materials were totally consumed according to LCMS. The resulting solution was separated by reversed phase flash chromatography (0-100% acetonitrile in aq. TFA (0.01%)) to give LP16f (18 mg, ESI m/z: 728.3 (M/2+H)⁺) as a white solid, which was dissolved in anhydrous DMF (1.9 mL). To the solution was added diethylamine (0.1 mL), and the yellow reaction solution was stirred at room temperature for half an hour until Fmoc was totally removed according to LCMS. The resulting solution was concentrated in vacuo and the the residue was purified by prep-HPLC (10-95% acetonitrile in aq. formic acid (0.01%)) to give linker-payload LP16 (6 mg, 34% yield) as a light yellow solid. ESI m/z: 616.9 (M/2+H)⁺. ¹H NMR (400 MHz, DMSO_{d6}) δ 10.03 (s, 1H), 8.80 (d, J=6.8 Hz, 1H), 8.51 (d, J=9.2 Hz, 1H), 8.41 (s, 1H), 8.15 (d, J=6.8 Hz, 1H), 7.90 (d, J=8.8 Hz, 1H), 7.79 (d, J=6.8 Hz, 1H), 7.60 (d, J=8.0 Hz, 2H), 7.42 (t, J=6.4 Hz, 1H), 7.32 (s, 1H), 7.27 (d, J=8.0 Hz, 2H), 6.56-6.50 (m, 1H), 6.05-6.01 (m, 1H), 5.63-5.58 (m, 1H), 5.43 (s, 4H), 5.21 (s, 2H), 4.93 (s, 2H), 4.63 (d, J=6.8 Hz, 2H), 4.42-4.35 (m, 1H), 4.23 (t, J=7.6 Hz, 1H), 4.02 (s, 2H), 3.63-3.58 (m, 4H), 3.53-3.49 (m, 12H), 3.46-3.43 (m, 2H), 3.18-3.15 (m, 2H), 3.06-2.93 (m, 2H), 2.79-2.76 (m, 2H), 2.42-2.36 (m, 5H), 2.24-2.12 (m, 2H), 2.03-1.93 (m, 1H), 1.89-1.81 (m, 2H), 1.74-1.65 (m, 1H), 1.65-1.54 (m, 1H), 1.48-1.31 (m, 3H), 0.89-0.82 (m, 9H) ppm. ¹⁹F NMR (400 MHz, DMSO_{d6}) δ −111 ppm.

### Example 3G: {4-[(2S)-5-(Carbamoylamino)-2-[(2S)-2-{1-[3-(2,5-dioxo-2,5-dihydro-1H-pyrrol-1-yl)propanamido]-3,6,9,12-tetraoxapentadecan-15-amido}-3-methylbutanamido]pentanamido]phenyl}methyl N-({[({[(10S,23S)-10-ethyl-18-fluoro-10-hydroxy-19-methyl-5,9-dioxo-8-oxa-4,15-diazahexacyclo[14.7.1.0²,¹⁴.0⁴,¹³.0⁶,¹¹.0²⁰,²⁴]tetracosa-1,6(11),12,14,16,18,20(24)-heptaen-23-yl]carbamoyl}methoxy)methyl]carbamoyl}methyl) carbamate (LP17)

[chemical structure]

[0750] To a yellow solution of LP16-1 (30 mg, 30 μmol) in anhydrous DMF (1.5 mL) were added DIPEA (8 mg, 62 μmol) and Ia (CAS: 756525-99-2, commercial, 16 ng, 30 μmol), and the reaction mixture was stirred at room temperature for an hour until starting materials were totally consumed according to LCMS. The resulting mixture was directly purified by prep-HPLC (0-100% acetonitrile in aq. TFA (0.05%)) to give LP17 (TFA salt, 15 mg, 38% yield) as a light yellow solid. ESI m/z: 692.4 (M/2+H). ¹H NMR (400 MHz, DMSO_{d6}) δ 9.99 (s, 1H), 8.79 (t, J=6.8 Hz, 1H), 8.50 (d, J=8.4 Hz, 1H), 8.11 (d, J=8.0 Hz, 1H), 8.02 (t, J=6.0 Hz, 1H), 7.87 (d, J=8.8 Hz, 1H), 7.79 (d, J=10.8 Hz, 1H), 7.59 (d, J=8.4 Hz, 2H), 7.41 (t, J=6.0 Hz, 1H), 7.32 (s, 1H), 7.28 (d, J=8.4 Hz, 2H), 7.00 (s, 2H), 6.52 (br s, 1H), 5.98 (t, J=6.0 Hz, 1H), 5.63-5.57 (m, 1H), 5.43-5.41 (m, 4H), 5.21 (s, 2H), 4.93 (s, 2H), 4.63 (d, J=6.8 Hz, 2H), 4.43-4.34 (m, 1H), 4.25-4.21 (m, 1H), 4.02 (s, 2H), 3.61-3.57 (m, 6H), 3.49-3.48 (m, 12H), 3.21-3.12 (m, 4H), 3.05-2.91 (m, 4H), 2.49-2.39 (m, 5H), 2.33 (t, J=7.2 Hz, 2H), 2.22-2.14 (m, 2H), 2.02-1.94 (m, 1H), 1.89-1.80 (m, 2H), 1.75-1.65 (m, 1H), 1.65-1.54 (m, 1H), 1.49-1.32 (m, 2H), 0.87-0.82 (m, 9H) ppm. (Proton of TFA was not revealed.) ¹⁹F NMR (376 MHz, DMSO_{d6}) δ −111, −73 ppm.

[0751] Linker-payloads LP1, LP2, LP13, LP14, LP15, LP19, LP20, LP21, and LP22 were synthesized as described in Scheme 4 and in Examples 3H-3AR, below.

[chemical structure]

### Example 3H: Methyl (4R)-4-amino-4-{[(1S)-1-{[(1S)-4-(carbamoylamino)-1-{[4-(hydroxymethyl) phenyl]carbamoyl}butyl]carbamoyl}-2-methylpropyl]carbamoyl}butanoate (^{D}EvcPAB)

[chemical structure]

[0753] To a solution of vcPAB (0.25 g, 0.95 mmol) in DMF (3 mL) were added DIPEA (0.37 g, 2.9 mmol) and HATU (0.25 g, 0.95 mmol), and the mixture was stirred at room temperature for 10 minutes before the addition of Boc-DGlu(OMe)-OH (0.40 g, 1.1 mmol). The reaction mixture was stirred at room temperature for 3 hours, which was monitored by LCMS. The resulting mixture was purified by reversed phase flash chromatography (0-70% acetonitrile in water) to give Boc-DEvcPAB (0.35 g, ESI m/z: 623.4 (M+H)⁺) as a white solid, which was dissolved in DCM (5 mL). To the solution was added TFA (1.5 mL), and the reaction mixture was stirred at room temperature for 3 hours until Boc was totally removed, which was monitored by LCMS. The volatiles were removed in vacuo and the residue was purified by reversed phase flash chromatography (10-40% acetonitrile in water) to give ^{D}EvcPAB (0.27 g, 48% yield) as a white solid. ESI m/z: 523.4 (M+H)⁺.

### Example 31: Methyl (4S)-4-amino-4-{[(1S)-1-{[(1S)-4-(carbamoylamino)-1-{[4-(hydroxymethyl) phenyl]carbamoyl}butyl]carbamoyl}-2-methylpropyl]carbamoyl}butanoate (^{L}EvcPAB)

[chemical structure]

[0755] Following the similar procedure as ^{D}EvcPAB except using Boc-LGlu(OMe)-OH instead of Boc-DGlu(OMe)-OH, intermediate ^{L}EvcPAB (0.18 g, 49% yield) was obtained as a light yellow solid. ESI m/z: 523.3 (M+H)⁺, 545.3 (M+Na)⁺.

### Example 3J: General procedure for LP #-2 and synthesis of LP13-2, LP16-2, LP1-2, and LP2-2

[0756] To a solution of LP13-1, LP16-1, LP1-1 or LP2-1 (1.0 equiv.) in DMF (0.25 mM) were added DIPEA (3.3 equiv.) and HATU (1.0 equiv.), and the mixture was stirred at room temperature or 10 minutes before the addition of vcPAB or EvcPAB (1.1-1.5 equiv.). The reaction mixture was stirred at room temperature for 3 hours, which was monitored by LCMS. The resulting mixture was directly purified by reversed phase flash chromatography (0-100% acetonitrile in water) to give linker LP #-2 (LP13-2, LP16-2, LP1-2, or LP2-2) as a white solid.

### Example 3K: (9H-Fluoren-9-yl)methyl N-{2-[2-(2-{[(1S)-1-{[(1S)-4-(carbamoylamino)-1-{[4-(hydroxymethyl)phenyl]carbamoyl}butyl]carbamoyl}-2-methylpropyl]carbamoyl}ethoxy)ethoxy] ethyl}carbamate (LP13-2)

[chemical structure]

[0758] Following the general procedure using vcPAB (0.85 g, 2.2 mmol) and LP13-1 (0.60 g, 1.5 mmol), compound LP13-2 (1.0 g, 87% yield) was obtained as a white solid. ESI m/z: 761.3 (M+H)⁺, 783.3 (M+Na)⁺.

### Example 3L: Methyl (4R)-4-{[(1S)-1-{[(1S)-4-(carbamoylamino)-1-{[4-(hydroxymethyl)phenyl] carbamoyl}butyl]carbamoyl}-2-methylpropyl]carbamoyl}-4-(3-{2-[2-({[(9H-fluoren-9-yl)methoxy] carbonyl}amino)ethoxy]ethoxy}propanamido)butanoate (LP14-2)

[chemical structure]

[0760] Following the general procedure starting from LP14-1 (0.19 g, 0.37 mmol) and DEvcPAB (0.14 g, 0.34 mmol), linker LP14-2 (0.20 g, 66% yield) was obtained as a white solid after purification by reversed phase flash chromatography (0-70% acetonitrile in water). ESI m/z: 904.4 (M+H)⁺.

### Example 3M: Methyl (4S)-4-{[(1S)-1-{[(1S)-4-(carbamoylamino)-1-{[4-(hydroxymethyl)phenyl] carbamoyl}butyl]carbamoyl}-2-methylpropyl]carbamoyl}-4-(3-{2-[2-({[(9H-fluoren-9-yl)methoxy]carbonyl}amino)ethoxy]ethoxy}propanamido)butanoate (LP15-2)

[chemical structure]

[0762] Following the general procedure starting from LP13-1 (0.45 g, 1.1 mmol) and ^{L}EvcPAB (0.65 g, 1.2 mmol), linker LP15-2 (0.70 g, 69% yield) was obtained as a white solid after purification by reversed phase flash chromatography (0-100% acetonitrile in water). ESI m/z: 904.5 (M+H)⁺. ¹H NMR (400 MHz, DMSO_{d6}) δ 9.94 (s, 1H), 8.15-8.07 (m, 2H), 7.91-7.87 (m, 2H), 7.78 (d, J=8.8 Hz, 1H), 7.69 (d, J=7.2 Hz, 2H), 7.55-7.52 (m, 2H), 7.41 (t, J=7.6 Hz, 2H), 7.35-7.30 (m, 3H), 7.23 (d, J=8.4 Hz, 2H), 6.00-5.93 (m, 1H), 5.42 (bs, 1H), 4.42 (s, 2H), 4.39-4.34 (m, 2H), 4.31-4.27 (m, 2H), 4.24-4.16 (m, 2H), 3.60-3.56 (m, 5H), 3.47 (s, 3H), 3.36-3.34 (m, 2H), 3.14-3.10 (m, 2H), 3.04-3.00 (m, 1H), 2.96-2.91 (m, 1H), 2.44-2.38 (m, 2H), 2.35-2.29 (m, 4H), 2.00-1.95 (m, 1H), 1.92-1.86 (m, 1H), 1.77-1.66 (m, 2H), 1.61-1.55 (m, 1H), 1.46-1.34 (m, 2H), 1.25-1.18 (m, 1H), 0.87-0.80 (m, 6H) ppm.

### Example 3N: N-[(1S)-1-{[(1S)-4-(Carbamoylamino)-1-{[4-(hydroxymethyl) phenyl]carbamoyl}butyl]carbamoyl}-2-methylpropyl]-1-[2-(cyclooct-2-yn-1-yloxy)acetamido]-3,6,9,12-tetraoxapentadecan-15-amide (LP1-2)

[chemical structure]

[0764] Following the general procedure starting from LP1-1 and vcPAB (3.3 g, 8.0 mmol), linker LP1-2 (4.3 g, 68% yield) was obtained as a white solid after purification by reversed phase flash chromatography (0-100% acetonitrile in water). ESI m/z: 791.5 (M+H)⁺.

### Example 30: Methyl (4R)-4-{[(1S)-1-{[(1S)-4-(carbamoylamino)-1-{[4-(hydroxymethyl)phenyl] carbamoyl}butyl]carbamoyl}-2-methylpropyl]carbamoyl}-4-[1-({[(9H-fluoren-9-yl)methoxy] carbonyl}amino)-3,6,9,12-tetraoxapentadecan-15-amido]butanoate (LP19-2)

[chemical structure]

[0766] Following the general procedure starting from DEvcPAB (0.17 g, 0.34 mmol) and LP16-1 (0.17 g, 0.34 mmol), linker LP19-2 (0.18 g, 53% yield) was obtained as a light yellow solid. ESI m/z: 993.5 (M+H)⁺.

### Example 3P: Methyl (4R)-4-{[(1S)-1-{[(1S)-4-(carbamoylamino)-1-{[4-(hydroxymethyl)phenyl] carbamoyl}butyl]carbamoyl}-2-methylpropyl]carbamoyl}-4-{1-[2-(cyclooct-2-yn-1-yloxy) acetamido]-3,6,9,12-tetraoxapentadecan-15-amido}butanoate (LP20-2)

[chemical structure]

[0768] Following the general procedure starting from ^{D}EvcPAB (0.28 g, 0.54 mmol) and LP1-1 (0.25 g, 0.48 mmol), compound LP20-2 (0.20 g, 44% yield) was obtained as a light yellow solid. ESI m/z: 934.5 (M+H)⁺.

### Example 3Q: Methyl (4S)-4-{[(1S)-1-{[(1S)-4-(carbamoylamino)-1-{[4-(hydroxymethyl)phenyl] carbamoyl}butyl]carbamoyl}-2-methylpropyl]carbamoyl}-4-[1-({[(9H-fluoren-9-yl)methoxy]carbonyl}amino)-3,6,9,12-tetraoxapentadecan-15-amido]butanoate (LP21-2)

[chemical structure]

[0770] Following the general procedure starting from ^{L}EvcPAB (0.20 g, 0.38 mmol) and LP16-1 (0.19 g, 0.39 mmol), compound LP21-2 (0.20 g, 53% yield) was obtained as a white solid. ESI m/z: 992.5 (M+H)⁺.¹H NMR (400 MHz, DMSO_{d6}) δ 9.94 (s, 1H), 8.13 (d, J=7.2 Hz, 1H), 8.08 (d, J=7.6 Hz, 1H), 7.89 (d, J=7.2 Hz, 2H), 7.77 (d, J=8.4 Hz, 1H), 7.70 (d, J=7.6 Hz, 2H), 7.54 (d, J=8.4 Hz, 2H), 7.44-7.39 (m, 2H), 7.35-7.31 (m, 3H), 7.23 (d, J=8.4 Hz, 2H), 5.98 (brs, 1H), 5.41 (br s, 1H), 4.43 (s, 2H), 4.39-4.33 (m, 2H), 4.31-4.29 (m, 2H), 4.23-4.17 (m, 2H), 3.63-3.57 (m, 6H), 3.50-3.46 (m, 12H), 3.41 (t, J=6.0 Hz, 2H), 3.16-3.10 (m, 2H), 3.10-3.00 (m, 1H), 2.99-2.89 (m, 1H), 2.40-2.30 (m, 4H), 2.02-1.87 (m, 2H), 1.78-1.55 (m, 3H), 1.48-1.32 (m, 2H), 0.86 (d, J=6.8 Hz, 3H), 0.83 (d, J=6.8 Hz, 3H) ppm. (proton of benzyl alcohol was not revealed.)

### Example 3R: Methyl (4S)-4-{[(1S)-1-{[(1S)-4-(carbamoylamino)-1-{[4-(hydroxymethyl)phenyl] carbamoyl}butyl]carbamoyl}-2-methylpropyl]carbamoyl}-4-{1-[2-(cyclooct-2-yn-1-yloxy)acetamido]-3,6,9,12-tetraoxapentadecan-15-amido}butanoate (LP22-2)

[chemical structure]

[0772] Following the general procedure starting from ^{L}EvcPAB (0.10 g, 0.19 mmol) and LP1-1 (81 mg, 0.19 mmol), compound LP22-2 (0.11 g, 63% yield) was obtained as a white solid. ESI m/z: 934.5 (M+H)⁺.

### Example 3S: General Procedure for LP #-3

[0773] To a solution of LP #-2 (1.0 equiv.) in DMF (0.15 mM) were added DMAP (1.0 equiv.), DIPEA (3.0 equiv.) and bis(4-nitrophenyl) carbonate (3.0 equiv.), and the reaction mixture was stirred at room temperature for an hour, which was monitored by LCMS. The resulting mixture was purified by reversed phase flash chromatography (0-60% acetonitrile in water) to give LP #-3 as light yellow oil.

### Example 3T: {4-[(2S)-5-(Carbamoylamino)-2-[(2S)-2-(3-{2-[2-({[(9H-fluoren-9-yl)methoxy] carbonyl}amino)ethoxy]ethoxy}propanamido)-3-methylbutanamido]pentanamido]phenyl}methyl 4-nitrophenyl carbonate (LP13-3)

[chemical structure]

[0775] Following the general procedure starting from LP13-2 (0.50 g, 0.66 mmol), linker LP13-3 (0.40 g, 68% yield) was obtained as light yellow oil, which was solidified in air. ESI m/z: 926.5 (M+H)⁺, 948.4 (M+Na)⁺.

### Example 3U: Methyl (4R)-4-{[(1S)-1-{[(1S)-4-(carbamoylamino)-1-{[4-({[(4-nitrophenoxy) carbonyl]oxy}methyl)phenyl]carbamoyl}butyl]carbamoyl}-2-methylpropyl]carbamoyl}-4-(3-{2-[2-({[(9H-fluoren-9-yl)methoxy]carbonyl}amino)ethoxy]ethoxy}propanamido)butanoate (LP14-3)

[chemical structure]

[0777] Following the general procedure starting from LP14-2 (0.20 g, 0.22 mmol), linker LP14-3 (0.18 g, 77% yield) was obtained as a white solid. ESI m/z: 1069.2 (M+H)⁺.

### Example 3V: Methyl (4S)-4-{[(1S)-1-{[(1S)-4-(carbamoylamino)-1-{[4-({[(4-nitrophenoxy) carbonyl]oxy}methyl)phenyl]carbamoyl}butyl]carbamoyl}-2-methylpropyl]carbamoyl}-4-(3-{2-[2-({[(9H-fluoren-9-yl)methoxy]carbonyl}amino)ethoxy]ethoxy}propanamido) butanoate (LP15-3)

[chemical structure]

[0779] Following the general procedure starting from LP15-2 (0.70 g, 0.77 mmol), linker LP15-3 (0.50 g, 61% yield) was obtained as light yellow oil. ESI m/z: 1069.5 (M+H)⁺.

### Example 3W: {4-[(2S)-5-(Carbamoylamino)-2-[(2S)-2-{1-[2-(cyclooct-2-yn-1-yloxy)acetamido]-3,6,9,12-tetraoxapentadecan-15-amido}-3-methylbutanamido]pentanamido]phenyl}methyl4-nitrophenyl carbonate (LP1-3)

[chemical structure]

[0781] Following the general procedure starting from LP1-2 (2.3 g, 2.9 mmol), linker LP1-3 (1.9 g, 69% yield) was obtained as light yellow oil. ESI m/z: 978.5 (M+Na)⁺.

### Example 3X Methyl (4R)-4-{[(1S)-1-{[(1S)-4-(carbamoylamino)-1-{[4-({[(4-nitrophenoxy) carbonyl]oxy}methyl)phenyl]carbamoyl}butyl]carbamoyl}-2-methylpropyl]carbamoyl}-4-[1-({[(9H-fluoren-9-yl)methoxy]carbonyl}amino)-3,6,9,12-tetraoxapentadecan-15-amido]butanoate (LP19-3)

[chemical structure]

[0783] Following the general procedure starting from LP19-2 (0.18 g, 0.18 mmol), linker LP19-3 (0.18 g, 86% yield) was obtained as light yellow oil. ESI m/z: 1157.5 (M+H)⁺.

### Example 3Y: Methyl (4R)-4-{[(1S)-1-{[(1S)-4-(carbamoylamino)-1-{[4-({[(4-nitrophenoxy) carbonyl]oxy}methyl)phenyl]carbamoyl}butyl]carbamoyl}-2-methylpropyl]carbamoyl}-4-{1-[2-(cyclooct-2-yn-1-yloxy)acetamido]-3,6,9,12-tetraoxapentadecan-15-amido}butanoate (LP20-3)

[chemical structure]

[0785] Following the general procedure starting from LP20-2 (0.20 g, 0.21 mmol), linker LP20-3 (0.20 g, 85% yield) was obtained as a yellow solid. ESI m/z: 1099.6 (M+H)⁺.

### Example 3Z: Methyl (4S)-4-{[(1S)-1-{[(1S)-4-(carbamoylamino)-1-{[4-({[(4-nitrophenoxy) carbonyl]oxy}methyl)phenyl]carbamoyl}butyl]carbamoyl}-2-methylpropyl]carbamoyl}-4-[1-({[(9H-fluoren-9-yl)methoxy]carbonyl}amino)-3,6,9,12-tetraoxapentadecan-15-amido]butanoate (LP21-3)

[chemical structure]

[0787] Following the general procedure starting from LP21-2 (0.20 g, 0.20 mmol), linker LP21-3 (0.19 g, 81% yield) was obtained as light yellow oil. ESI m/z: 1157.4 (M+H)⁺. ¹H NMR (400 MHz, DMSO_{d6}) δ 10.11 (s, 1H), 8.32 (d, J=8.8 Hz, 2H), 8.17 (d, J=7.2 Hz, 1H), 8.09 (d, J=8.0 Hz, 1H), 7.89 (d, J=7.6 Hz, 2H), 7.77 (d, J=8.4 Hz, 1H), 7.69 (d, J=7.2 Hz, 2H), 7.65 (d, J=8.4 Hz, 2H), 7.57 (d, J=9.2 Hz, 2H), 7.44-7.40 (m, 4H), 7.35-7.31 (m, 3H), 5.99 (br s, 1H), 5.42 (br s, 1H), 5.25 (s, 2H), 4.42-4.36 (m, 2H), 4.29 (d, J=6.8 Hz, 2H), 4.23-4.17 (m, 2H), 3.61-3.57 (m, 6H), 3.50-3.46 (m, 12H), 3.41 (t, J=6.0 Hz, 2H), 3.16-3.11 (m, 2H), 3.12-3.00 (m, 1H), 3.00-2.89 (m, 1H), 2.40-2.30 (m, 4H), 2.01-1.88 (m, 2H), 1.80-1.56 (m, 3H), 1.50-1.33 (m, 2H), 0.87 (d, J=6.8 Hz, 3H), 0.83 (d, J=6.8 Hz, 3H) ppm.

### Example 3AA: Methyl (4S)-4-{[(1S)-1-{[(1S)-4-(carbamoylamino)-1-{[4-({[(4-nitrophenoxy) carbonyl]oxy}methyl)phenyl]carbamoyl}butyl]carbamoyl}-2-methylpropyl]carbamoyl}-4-{1-[2-(cyclooct-2-yn-1-yloxy)acetamido]-3,6,9,12-tetraoxapentadecan-15-amido}butanoate (LP22-3)

[chemical structure]

[0789] Following the general procedure starting from LP08b-2 (0.10 g, 0.11 mmol), linker LP08b-3 (71 mg, 60% yield) was obtained as a white solid. ESI m/z: 550.5 (M/2+H)⁺.

### Example 3AB: General Procedure for LP1, LP2 and LP #-4

[0790] To a solution of LP #-3 (1.0-1.2 equiv.) in DMF (0.15 mM) were added HOBt (0.5 equiv.), DIPEA (3.0 equiv.) and payload P (1.0 equiv.), and the reaction mixture was stirred at room temperature for 2 hours, which was monitored by LCMS. The resulting mixture was directly purified by reversed phase flash chromatography to give LP1, LP2 or LP #-4 as a white solid.

### Example 3AC: {4-[(2S)-5-(Carbamoylamino)-2-[(2S)-2-{1-[2-(cyclooct-2-yn-1-yloxy)acetamido]-3,6,9,12-tetraoxapentadecan-15-amido}-3-methylbutanamido]pentanamido]phenyl}methyl N-({[({[(10S,23S)-10-ethyl-18-fluoro-10-hydroxy-19-methyl-5,9-dioxo-8-oxa-4,15-diazahexacyclo[14.7.1.0²,¹⁴.0⁴,¹³0⁶,¹¹.0²⁰,²⁴]tetracosa-1,6(11),12,14,16,18,20(24)-heptaen-23-yl]carbamoyl}methoxy)methyl]carbamoyl}methyl)carbamate (LP1)

[chemical structure]

[0792] Following the general procedure starting from payload P3 (0.85 g, 1.2 mmol) and LP1-3 (1.2 g, 1.2 mmol), linker-payload LP1 (1.1 g, 62% yield, formic acid salt) was obtained as a white solid after purification by prep-HPLC (5-60% acetonitrile in aq. formic acid (0.1%)). ESI m/z: 699.0 (M/2+H)⁺. ¹H NMR (400 MHz, DMSO_{d6}) δ 10.00 (s, 1H), 8.80 (t, J=6.4 Hz, 1H), 8.51 (d, J=8.8 Hz, 1H), 8.13 (d, J=7.6 Hz, 1H), 7.90 (d, J=8.8 Hz, 1H), 7.79 (d, J=10.8 Hz, 1H), 7.65-7.50 (m, 3H), 7.43 (t, J=6.0 Hz, 1H), 7.31 (s, 1H), 7.27 (d, J=8.8 Hz, 2H), 6.54 (s, 1H), 5.98 (t, J=5.2 Hz, 1H), 5.63-5.57 (m, 1H), 5.41 (s, 4H), 5.21 (s, 2H), 4.92 (s, 2H), 4.62 (d, J=6.4 Hz, 2H), 4.43-4.33 (m, 1H), 4.31-4.17 (m, 2H), 4.01 (s, 2H), 3.86 (d, J=14.4 Hz, 1H), 3.75 (d, J=14.8 Hz, 1H), 3.67-3.46 (m, 15H), 3.44-3.39 (m, 2H), 3.27-3.10 (m, 4H), 3.06-2.90 (m, 2H), 2.47-2.32 (m, 5H), 2.26-1.64 (m, 14H), 1.63-1.52 (m, 3H), 1.47-1.32 (m, 3H), 0.90-0.80 (m, 9H) ppm. ¹⁹F NMR (376 MHz, DMSO_{d6}) δ −111 ppm.

### Example 3AD: {4-[(2S)-2-[(2S)-2-[1-(4-{2-Azatricyclo[10.4.0.0⁴,⁹]hexadeca-1(12),4(9),5,7,13,15-hexaen-10-yn-2-yl}-4-oxobutanamido)-3,6,9,12-tetraoxapentadecan-15-amido]-3-methylbutanamido]-5-(carbamoylamino)pentanamido]phenyl}methyl N-({[({[(10S,23S)-10-ethyl-18-fluoro-10-hydroxy-19-methyl-5,9-dioxo-8-oxa-4,15-diazahexacyclo [14.7.1.0²,¹⁴.0⁴,¹³0⁶,¹¹.0²⁰,²⁴]tetracosa-1,6(11),12,14,16,18,20(24)-heptaen-23-yl]carbamoyl}methoxy)methyl]carbamoyl}methyl)carbamate (LP2)

[chemical structure]

[0794] Following the general procedure starting from payload P3 (10 mg, 17 μmol) and LP2-3 (CAS 2226472-28-0, synthesized according to WO2018089373, 18 mg, 17 μmol), linker-payload LP2 (12 mg, 46% yield) was obtained as a white solid after purification by prep-HPLC (5-95% acetonitrile in aq. ammonium bicarbonate (10 mM)). ESI m/z: 513.4 (M/3+H)⁺, Rt=6.63 min in HPLC (E-ring-opened form, 34%); 507.4 (M/3+H), 760.5 (M/2+H), Rt=7.45 min in HPLC (lactone form, 64%). ¹H NMR (400 MHz, DMSO_{d6}) δ 9.99 (s, 1H), 8.80 (t, J=6.4 Hz, 1H), 8.50 (d, J=8.8 Hz, 1H), 8.12 (d, J=7.2 Hz, 1H), 7.87 (d, J=8.4 Hz, 1H), 7.80-7.75 (m. 2H), 7.69-7.67 (m, 1H), 7.63-7.58 (m, 3H), 7.51-7.46 (m, 3H), 7.45-7.33 (m, 3H), 7.32-7.26 (m, 4H), 6.53 (s, 1H), 5.98 (t, J=6.0 Hz, 1H), 5.63-5.57 (m, 1H), 5.42 (s, 4H), 5.21 (s, 2H), 5.03 (d, J=14.0 Hz, 1H), 4.93 (s, 2H), 4.63 (d, J=6.8 Hz, 2H), 4.41-4.35 (m, 1H), 4.25-4.21 (m, 1H), 4.02 (s, 2H), 3.62-3.57 (m, 5H), 3.48-3.45 (m, 12H), 3.31-3.28 (m, 2H), 3.23-3.14 (m, 2H), 3.11-3.07 (m, 2H), 3.05-2.98 (m, 1H), 2.96-2.91 (m, 1H), 2.60-2.55 (m, 1H), 2.46-2.44 (m, 1H), 2.39 (s, 3H), 2.35-2.33 (m, 1H), 2.26-2.15 (m, 3H), 2.03-1.94 (m, 2H), 1.88-1.67 (m, 4H), 1.63-1.57 (m, 1H), 1.46-1.33 (m, 2H), 0.88-0.81 (m, 9H) ppm. 19F NMR (376 MHz, DMSO_{d6}) δ −111 ppm.

### Example 3AE: (9H-Fluoren-9-yl)methyl N-{2-[2-(2-{[(1S)-1-{[(1S)-4-(carbamoylamino)-1-{[4-({[({[({[(10S,23S)-10-ethyl-18-fluoro-10-hydroxy-19-methyl-5,9-dioxo-8-oxa-4,15-diazahexacyclo[14.7.1.0²,¹⁴.0⁴,¹³0⁶,¹¹.0²⁰,²⁴]tetracosa-1,6(11),12,14,16,18,20(24)-heptaen-23-yl]carbamoyl}methoxy)methyl]carbamoyl}methyl)carbamoyl]oxy}methyl)phenyl]carbamoyl}butyl]carbamoyl}-2-methylpropyl]carbamoyl}ethoxy)ethoxy]ethyl}carbamate (LP13-4)

[chemical structure]

[0796] Following the general procedure starting from LP13-3 (0.10 g, 0.11 mmol) and payload P3 (77 mg, 0.11 mmol), compound LP13-4 (0.12 g, 78% yield) was obtained as light yellow oil after purification by reversed phase flash chromatography (0-100% acetonitrile in water in 10 minutes and then 100% acetonitrile for 5 minutes). ESI m/z: 684.0 (M/2+H)⁺.

### Example 3AF: Methyl (4R)-4-{[(1S)-1-{[(1S)-4-(carbamoylamino)-1-{[4-({[({[({[(10S,23S)-10-ethyl-18-fluoro-10-hydroxy-19-methyl-5,9-dioxo-8-oxa-4,15-diazahexacyclo[14.7.1.0²,¹⁴.0⁴,¹³0⁶,¹¹.0²⁰,²⁴]tetracosa-1,6(11),12,14,16,18,20(24)-heptaen-23-yl]carbamoyl}methoxy)methyl]carbamoyl}methyl)carbamoyl]oxy}methyl)phenyl]carbamoyl}butyl]carbamoyl}-2-methylpropyl]carbamoyl}-4-(3-{2-[2-({[(9H-fluoren-9-yl)methoxy]carbonyl}amino)ethoxy]ethoxy}propanamido)butanoate (LP14-4)

[chemical structure]

[0798] Following the general procedure starting from LP14-3 (0.12 g, 0.11 mmol) and payload P3 (64 mg, 0.11 mmol), compound LP14-4 (0.13 g, 78% yield) was obtained as a white solid after purification by reversed phase flash chromatography (0-60% acetonitrile in aq. ammonium bicarbonate (10 mM)). ESI m/z: 755.7 (M/2+H)⁺.

### Example 3AG: Methyl (4S)-4-{[(1S)-1-{[(1S)-4-(carbamoylamino)-1-{[4-({[({[({[(10S,23S)-10-ethyl-18-fluoro-10-hydroxy-19-methyl-5,9-dioxo-8-oxa-4,15-diazahexacyclo[14.7.1.0²,¹⁴.0⁴,¹³0⁶,¹¹.0²⁰,²⁴]tetracosa-1,6(11),12,14,16,18,20(24)-heptaen-23-yl]carbamoyl}methoxy)methyl]carbamoyl}methyl)carbamoyl]oxy}methyl)phenyl]carbamoyl}butyl]carbamoyl}-2-methylpropyl]carbamoyl}-4-(3-{2-[2-({[(9H-fluoren-9-yl)methoxy]carbonyl}amino) ethoxy]ethoxy}propanamido)butanoate (LP15-4)

[chemical structure]

[0800] Following the general procedure starting from LP15-3 (0.50 g, 0.47 mmol) and P3 (0.22 g, 0.38 mmol), compound LP15-4 (0.40 g, 56% yield) was obtained as a white solid. ESI m/z: 755.5 (M/2+H)⁺.

### Example 3AH: Methyl (4R)-4-{[(1S)-1-{[(1S)-4-(carbamoylamino)-1-{[4-({[({[({[(10S,23S)-10-ethyl-18-fluoro-10-hydroxy-19-methyl-5,9-dioxo-8-oxa-4,15-diazahexacyclo[14.7.1.0²,¹⁴.0⁴,¹³0⁶,¹¹.0²⁰,²⁴]tetracosa-1,6(11),12,14,16,18,20(24)-heptaen-23-yl]carbamoyl}methoxy)methyl]carbamoyl}methyl)carbamoyl]oxy}methyl)phenyl]carbamoyl}butyl]carbamoyl}-2-methylpropyl]carbamoyl}-4-[1-({[(9H-fluoren-9-yl)methoxy]carbonyl}amino)-3,6,9,12-tetraoxapentadecan-15-amido]butanoate (LP19-4)

[chemical structure]

[0802] Following the general procedure starting from LP19-3 (80 mg, 69 μmol) and payload P3 (40 mg, 69 μmol), compound LP19-4 (70 mg, 64% yield) was obtained as a white solid. ESI m/z: 799.5 (M/2+H)⁺.

### Example 3AI: Methyl (4R)-4-{[(1S)-1-{[(1S)-4-(carbamoylamino)-1-{[4-({[({[({[(10S,23S)-10-ethyl-18-fluoro-10-hydroxy-19-methyl-5,9-dioxo-8-oxa-4,15-diazahexacyclo [14.7.1.0²,¹⁴.0⁴,¹³0⁶,¹¹.0²⁰,²⁴]tetracosa-1,6(11),12,14,16,18,20(24)-heptaen-23-yl]carbamoyl}methoxy)methyl]carbamoyl}methyl)carbamoyl]oxy}methyl)phenyl]carbamoyl}butyl]carbamoyl}-2-methylpropyl]carbamoyl}-4-{1-[2-(cyclooct-2-yn-1-yloxy)acetamido]-3,6,9,12-tetraoxapentadecan-15-amido}butanoate (LP20-4)

[chemical structure]

[0804] Following the general procedure starting from LP20-3 (95 mg, 86 μmol) and payload P3 (58 mg, 0.10 mmol), compound LP20-4 (60 mg, 45% yield) was obtained as a light yellow solid. ESI m/z: 770.6 (M/2+H)⁺.

### Example 3AJ: Methyl (4S)-4-{[(1S)-1-{[(1S)-4-(carbamoylamino)-1-{[4-({[({[({[(10S,23S)-10-ethyl-18-fluoro-10-hydroxy-19-methyl-5,9-dioxo-8-oxa-4,15-diazahexacyclo[14.7.1.0²,¹⁴.0⁴,¹³0⁶,¹¹.0²⁰,²⁴]tetracosa-1,6(11),12,14,16,18,20(24)-heptaen-23-yl]carbamoyl}methoxy)methyl]carbamoyl}methyl)carbamoyl]oxy}methyl)phenyl]carbamoyl}butyl]carbamoyl}-2-methylpropyl]carbamoyl}-4-[1-({[(9H-fluoren-9-yl)methoxy]carbonyl}amino)-3,6,9,12-tetraoxapentadecan-15-amido]butanoate (LP21-4)

[chemical structure]

[0806] Following the general procedure starting from LP21-3 (58 mg, 50 μmol) and payload P3 (35 mg, 50 μmol), compound LP21-4 (51 mg, 64% yield) was obtained as a white solid. ESI m/z: 799.8 (M/2+H)⁺. ¹H NMR (400 MHz, DMSO_{d6}) δ 10.04 (s, 1H), 8.80 (t, J=6.4 Hz, 1H), 8.51 (d, J=8.4 Hz, 1H), 8.16 (d, J=7.6 Hz, 1H), 8.09 (d, J=7.6 Hz, 1H), 7.88 (d, J=7.6 Hz, 2H), 7.78 (d, J=10.8 Hz, 2H), 7.69 (d, J=7.2 Hz, 2H), 7.58 (d, J=8.8 Hz, 2H), 7.44-7.39 (m, 3H), 7.34-7.31 (m, 4H), 7.27 (d, J=8.4 Hz, 2H), 6.53 (br s, 1H), 5.99 (br s, 1H), 5.62-5.57 (m. 1H), 5.42 (s, 2H), 5.46-5.37 (m. 1H), 5.20 (s, 2H), 4.93 (s, 2H), 4.63 (d, J=5.6 Hz, 2H), 4.41-4.33 (m, 2H), 4.30-4.28 (m, 2H), 4.22-4.16 (m, 2H), 4.02 (s, 2H), 3.63-3.57 (m, 8H), 3.50-3.46 (m, 12H), 3.40 (t, J=6.0 Hz, 2H), 3.26-3.18 (m, 1H), 3.15-3.10 (m, 3H), 3.07-2.99 (m, 1H), 2.99-2.90 (m, 1H), 2.42-2.30 (m, 7H), 2.21-2.14 (m, 2H), 1.97-1.82 (m, 4H), 1.77-1.59 (m, 3H), 1.54-1.32 (m, 2H), 0.88-0.82 (m, 9H) ppm.

### Example 3AK: Methyl (4S)-4-{[(1S)-1-{[(1S)-4-(carbamoylamino)-1-{[4-({[({[({[(10S,23S)-10-ethyl-18-fluoro-10-hydroxy-19-methyl-5,9-dioxo-8-oxa-4,15-diazahexacyclo[14.7.1.0²,¹⁴.0⁴,¹³0⁶,¹¹.0²⁰,²⁴]tetracosa-1,6(11),12,14,16,18,20(24)-heptaen-23-yl]carbamoyl}methoxy)methyl]carbamoyl}methyl)carbamoyl]oxy}methyl)phenyl]carbamoyl}butyl]carbamoyl}-2-methylpropyl]carbamoyl}-4-{1-[2-(cyclooct-2-yn-1-yloxy)acetamido]-3,6,9,12-tetraoxapentadecan-15-amido}butanoate

[chemical structure]

[0808] Following the general procedure starting from LP22-3 (80 mg, 73 μmol) and payload P3 (43 mg, 73 μmol), compound LP22-4 (60 mg, 60% yield) was obtained as a white solid after purification by reversed phase flash chromatography (0-60% acetonitrile in aq. ammonium bicarbonate (10 mM)). ESI m/z: 770.5 (M/2+H)⁺.

### Example 3AL: {4-[(2S)-2-[(2S)-2-{3-[2-(2-Aminoethoxy)ethoxy]propanamido}-3-methylbutanamido]-5-(carbamoylamino)pentanamido]phenyl}methyl N-({[({[(10S,23S)-10-ethyl-18-fluoro-10-hydroxy-19-methyl-5,9-dioxo-8-oxa-4,15-diazahexacyclo [14.7.1.0²,¹⁴.0⁴,¹³0⁶,¹¹.0²⁰,²⁴]tetracosa-1,6(11),12,14,16,18,20(24)-heptaen-23-yl]carbamoyl}methoxy)methyl]carbamoyl}methyl)carbamate (LP13)

[chemical structure]

[0810] To a solution of LP13-4 (0.12 g, 84 μmol) in anhydrous DMF (1.8 mL) was added diethylamine (0.2 mL), and the mixture was stirred at room temperature for an hour until Fmoc was totally removed according to LCMS. The resulting solution was directly separated by reversed phase flash chromatography (0-100% acetonitrile in aq. TFA (0.01%) in 10 minutes) to give LP13 (50 mg, 52% yield) as a light yellow solid. ESI m/z: 573.0 (M/2+H)⁺.

### Example 3AM: (4R)-4-{3-[2-(2-Aminoethoxy)ethoxy]propanamido}-4-{[(1S)-1-{[(1S)-4-(carbamoylamino)-1-{[4-({[({[({[(10S,23S)-10-ethyl-18-fluoro-10-hydroxy-19-methyl-5,9-dioxo-8-oxa-4,15-diazahexacyclo[14.7.1.0²,¹⁴.0⁴,¹³0⁶,¹¹.0²⁰,²⁴]tetracosa-1,6(11),12,14,16,18, 20(24)-heptaen-23-yl]carbamoyl}methoxy)methyl]carbamoyl}methyl)carbamoyl]oxy}methyl) phenyl]carbamoyl}butyl]carbamoyl}-2-methylpropyl]carbamoyl}butanoic acid (LP14)

[chemical structure]

[0812] To a solution of compound LP14-4 (0.10 g, 66 μmol) in DMF (3 mL) was added piperidine (56 mg, 0.66 mmol), and the mixture was stirred at room temperature for 2 hours until Fmoc was removed, which was monitored by LCMS. To the reaction mixture were added aq. lithium hydroxide (0.2 mM, 1 mL) and THF (3 mL), and the mixture was stirred at room temperature for another an hour until methyl ester was totally hydrolyzed according to LCMS. After filtered, the resulting mixture was acidified by PBS buffer (pH 3.0) to pH 5.0 and then concentrated in vacuo. The residue was purified by prep-HPLC (10-95% acetonitrile in aq. TFA (0.01%)) to give linker-payload LP14 (40 mg, 47% yield) as a white solid. ESI m/z: 637.5 (M/2+H)⁺.

### Example 3AN: (4S)-4-{3-[2-(2-Aminoethoxy)ethoxy]propanamido}-4-{[(1S)-1-{[(1S)-4-(carbamoylamino)-1-{[4-({[({[({[(10S,23S)-10-ethyl-18-fluoro-10-hydroxy-19-methyl-5,9-dioxo-8-oxa-4,15-diazahexacyclo[14.7.1.0²,¹⁴.0⁴,¹³0⁶,¹¹.0²⁰,²⁴]tetracosa-1,6(11),12,14,16,18,20 (24)-heptaen-23-yl]carbamoyl}methoxy)methyl]carbamoyl}methyl)carbamoyl]oxy}methyl)phenyl]carbamoyl}butyl]carbamoyl}-2-methylpropyl]carbamoyl}butanoic acid (LP15)

[chemical structure]

[0814] Following the similar procedure as LP14 except substituting LP15-4 for LP14-4, linker-payload LP15 (50 mg, 14% yield) was obtained as a white solid after purification by prep-HPLC (10-95% acetonitrile in aq. TFA (0.05%)). ESI m/z: 637.4 (M/2+H)⁺.

### Example 3AO: (4R)-4-(1-Amino-3,6,9,12-tetraoxapentadecan-15-amido)-4-{[(1S)-1-{[(1S)-4-(carbamoylamino)-1-{[4-({[({[({[(10S,23S)-10-ethyl-18-fluoro-10-hydroxy-19-methyl-5,9-dioxo-8-oxa-4,15-diazahexacyclo[14.7.1.0²,¹⁴.0⁴,¹³0⁶,¹¹.0²⁰,²⁴]tetracosa-1,6(11),12,14,16,18, 20(24)-heptaen-23-yl]carbamoyl}methoxy)methyl]carbamoyl}methyl)carbamoyl]oxy}methyl) phenyl]carbamoyl}butyl]carbamoyl}-2-methylpropyl]carbamoyl}butanoic acid (LP19)

[chemical structure]

[0816] Following the similar procedure as LP14 except substituting LP19-4 (60 mg, 38 μmol) for LP14-4, linker-payload LP19 (12 mg, 24% yield) was obtained as a white solid after purification by prep-HPLC (10-95% acetonitrile in aq. TFA (0.05%)). ESI m/z: 681.5 (M/2+H)⁺.

[0817] ¹H NMR (400 MHz, DMSO_{d6}) δ 9.80 (s, 1H), 8.81 (t, J=6.4 Hz, 1H), 8.52 (d, J=8.8 Hz, 1H), 8.19-8.13 (m, 2H), 8.08 (d, J=8.4 Hz, 1H), 7.81-7.75 (m, 3H), 7.61 (d, J=6.4 Hz, 2H), 7.43 (t, J=6.0 Hz, 1H), 7.31 (s, 1H), 7.27 (d, J=8.4 Hz, 2H), 6.55 (br s, 1H), 6.04-5.99 (m, 1H), 5.64-5.57 (m, 1H), 5.43-5.40 (m, 2H), 5.20 (s, 2H), 4.93 (s, 2H), 4.63 (d, J=6.4 Hz, 2H), 4.40-4.32 (m, 2H), 4.23-4.19 (m, 1H), 4.02 (s, 2H), 3.63-3.60 (m, 4H), 3.59-3.57 (m, 4H), 3.56-3.54 (m, 3H), 3.51-3.49 (m, 5H), 3.01-2.95 (m, 4H), 2.44-2.41 (m, 1H), 2.39 (s, 3H), 2.31-2.28 (m, 1H), 2.26-2.21 (m, 3H), 2.20-2.15 (m, 2H), 2.09-2.01 (m, 2H), 1.90-1.82 (m, 4H), 1.78-1.72 (m, 2H), 1.66-1.61 (m, 1H), 1.50-1.41 (m, 2H), 1.40-1.35 (m, 1H), 0.90-0.82 (m, 11H) ppm. (the proton of COOH was not revealed)¹⁹F NMR (376 MHz, DMSO_{d6}) δ −73.70, −111.28 ppm.

### Example 3AP: (4R)-4-{[(1S)-1-{[(1S)-4-(Carbamoylamino)-1-{[4-({[({[({[(10S,23S)-10-ethyl-18-fluoro-10-hydroxy-19-methyl-5,9-dioxo-8-oxa-4,15-diazahexacyclo [14.7.1.0²,¹⁴.0⁴,¹³0⁶,¹¹.0²⁰,²⁴]tetracosa-1,6(11),12,14,16,18,20(24)-heptaen-23-yl]carbamoyl}methoxy)methyl]carbamoyl}methyl)carbamoyl]oxy}methyl)phenyl]carbamoyl}butyl]carbamoyl}-2-methylpropyl]carbamoyl}-4-{1-[2-(cyclooct-2-yn-1-yloxy)acetamido]-3,6,9,12-tetraoxapentadecan-15-amido}butanoic acid (LP20)

[chemical structure]

[0819] To a solution of compound LP20-4 (60 mg, 39 μmol) in water (1 mL) and THF (3 mL) was added aq. lithium hydroxide (0.12 M, 1 mL), and the reaction mixture was stirred at room temperature for 2 hours until methyl ester was totally hydrolyzed, which was monitored by LCMS. The mixture was acidified by PBS buffer (pH 4.0) until pH 6.0, and was then concentrated in vacuo. The residue was purified by prep-HPLC (10-95% acetonitrile in aq. TFA (0.05%)) to give LP20 (15 mg, 25% yield) as a white solid. ESI m/z: 763.5 (M/2+H)⁺. ¹H NMR (400 MHz, DMSO_{d6}) δ 9.78 (s, 1H), 8.80 (t, J=6.8 Hz, 1H), 8.51 (t, J=8.8 Hz, 1H), 8.18-8.12 (m, 2H), 8.07 (d, J=6.0 Hz, 1H), 7.78 (d, J=11.2 Hz, 1H), 7.63-7.59 (m, 3H), 7.43 (t, J=6.0 Hz, 1H), 7.32-7.22 (m, 4H), 7.11-6.96 (m, 1H), 6.61-6.45 (br s, 1H), 6.02-5.96 (m, 1H), 5.63-5.57 (m, 1H), 5.44-5.38 (m, 3H), 5.20 (s, 2H), 4.92 (s, 2H), 4.63 (d, J=6.0 Hz, 2H), 4.40-4.33 (m, 2H), 4.29-4.25 (m, 1H), 4.24-4.18 (m, 1H), 4.01 (s, 2H), 3.89-3.84 (m, 1H), 3.78-3.73 (m, 1H), 3.63-3.60 (m, 2H), 3.57-3.55 (m, 1H), 3.51-3.47 (m, 8H), 3.27-3.21 (m, 4H), 3.17-3.12 (m, 1H), 3.03-2.99 (m, 1H), 2.97-2.93 (m, 1H), 2.44-2.41 (m, 1H), 2.39 (br s, 3H), 2.28-2.14 (m, 7H), 2.08-1.99 (m, 2H), 1.94-1.81 (m, 6H), 1.80-1.71 (m, 5H), 1.63-1.54 (m, 3H), 1.40-1.33 (m, 4H), 0.90-0.81 (m, 11H) ppm. (The protons of acid and TFA were not revealed.) ¹⁹F NMR (400 MHz, DMSO_{d6}) δ −73.86, −111.30 ppm.

### Example 3AQ: (4S)-4-(1-Amino-3,6,9,12-tetraoxapentadecan-15-amido)-4-{[(1S)-1-{[(1S)-4-(carbamoylamino)-1-{[4-({[({[({[(10S,23S)-10-ethyl-18-fluoro-10-hydroxy-19-methyl-5,9-dioxo-8-oxa-4,15-diazahexacyclo[14.7.1.0²,¹⁴.0⁴,¹³0⁶,¹¹.0²⁰,²⁴]tetracosa-1,6(11),12,14,16,18, 20(24)-heptaen-23-yl]carbamoyl}methoxy)methyl]carbamoyl}methyl)carbamoyl]oxy}methyl) phenyl]carbamoyl}butyl]carbamoyl}-2-methylpropyl]carbamoyl}butanoic acid (LP21)

[chemical structure]

[0821] Following the similar procedure as LP14 except substituting LP21-4 (45 mg, 28 μmol) for LP14-4, linker-payload LP21 (10 mg, 26% yield) was obtained as a white solid after purification by prep-HPLC (10-95% acetonitrile in aq. TFA (0.05%)). ESI m/z: 681.4 (M/2+H)⁺.

[0822] ¹H NMR (400 MHz, DMSO_{d6}) δ 10.05 (s, 1H), 8.81 (t, J=7.2 Hz, 1H), 8.52 (d, J=8.4 Hz, 1H), 8.19 (d, J=7.6 Hz, 1H), 8.09 (d, J=8.0 Hz, 1H), 7.81-7.68 (m, 5H), 7.58 (d, J=8.4 Hz, 2H), 7.43 (t, J=6.8 Hz, 1H), 7.32 (s, 1H), 7.27 (d, J=8.4 Hz, 2H), 6.54 (brs, 1H), 6.03-5.97 (m, 1H), 5.63-5.57 (m, 1H), 5.48-5.42 (m, 3H), 5.21 (s, 2H), 4.92 (s, 2H), 4.63 (d, J=6.4 Hz, 2H), 4.42-4.31 (m, 2H), 4.22-4.17 (m, 1H), 4.02 (s, 2H), 3.62-3.55 (m, 8H), 3.51-3.48 (m, 12H), 3.20-3.12 (m, 2H), 3.05-2.89 (m, 5H), 2.40 (s, 3H), 2.26-2.21 (m, 2H), 2.20-2.12 (m, 2H), 2.02-1.95 (m, 1H), 1.90-1.80 (m, 3H), 1.74-1.63 (m, 2H), 1.59-1.54 (m, 1H), 1.49-1.31 (m, 2H), 0.88-0.82 (m, 9H) ppm. (The proton of COOH was not revealed)¹⁹F NMR (376 MHz, DMSO_{d6}) δ −73, −111 ppm.

### Example 3AR: (4S)-4-{[(1S)-1-{[(1S)-4-(Carbamoylamino)-1-{[4-({[({[({[(10S,23S)-10-ethyl-18-fluoro-10-hydroxy-19-methyl-5,9-dioxo-8-oxa-4,15-diazahexacyclo [14.7.1.0²,¹⁴.0⁴,¹³0⁶,¹¹.0²⁰,²⁴]tetracosa-1,6(11),12,14,16,18,20(24)-heptaen-23-yl]carbamoyl}methoxy)methyl]carbamoyl}methyl)carbamoyl]oxy}methyl)phenyl]carbamoyl}butyl]carbamoyl}-2-methylpropyl]carbamoyl}-4-{1-[2-(cyclooct-2-yn-1-yloxy)acetamido]-3,6,9,12-tetraoxapentadecan-15-amido}butanoic acid (LP22)

[chemical structure]

[0824] Following the similar procedure as LP20 except substituting LP22-4 (60 mg, 39 μmol) for LP20-4, linker-payload LP22 (15 mg, 26% yield) was obtained as a white solid after purification by prep-HPLC (10-95% acetonitrile in aq. TFA (0.05%)). ESI m/z: 763.5 (M/2+H)⁺. ¹H NMR (400 MHz, DMSO_{d6}) δ 9.78 (br s, 1H), 8.80 (t, J=6.8 Hz, 1H), 8.51 (t, J=8.8 Hz, 1H), 8.18-8.12 (m, 2H), 8.07 (d, J=6.0 Hz, 1H), 7.78 (d, J=11.2 Hz, 1H), 7.63-7.59 (m, 3H), 7.43 (t, J=6.0 Hz, 1H), 7.32-7.22 (m, 4H), 7.11-6.96 (m, 1H), 6.61-6.45 (br s, 1H), 6.02-5.96 (m, 1H), 5.63-5.57 (m, 1H), 5.43-5.40 (m, 2H), 5.20 (s, 2H), 4.92 (s, 2H), 4.63 (d, J=6.0 Hz, 2H), 4.40-4.33 (m, 2H), 4.29-4.25 (m, 1H), 4.23-4.18 (m, 1H), 4.01 (s, 2H), 3.89-3.84 (m, 1H), 3.78-3.73 (m, 1H), 3.63-3.60 (m, 2H), 3.57-3.55 (m, 1H), 3.51-3.47 (m, 8H), 3.46-3.45 (m, 2H), 3.27-3.21 (m, 4H), 3.17-3.13 (m, 1H), 3.03-2.99 (m, 1H), 2.97-2.93 (m, 1H), 2.46-2.41 (m, 1H), 2.39 (s, 3H), 2.36-2.31 (m, 1H), 2.27-2.16 (m, 7H), 2.09-2.00 (m, 1H), 2.00-1.81 (m, 7H), 1.80-1.68 (m, 4H), 1.62-1.54 (m, 3H), 1.40-1.35 (m, 3H), 0.90-0.81 (m, 11H) ppm. (proton of COOH was not revealed)¹⁹F NMR (376 MHz, DMSO_{d6}) δ −73.86, −111.30 ppm.

### Example 4: Synthesis of Peptide Linker-Payloads

[0825] Linker-payloads LP3, LP4, LP7/LP7′, and LP9 were synthesized as described in Scheme 5 and Examples 4A-4F, below.

[0826] Starting materials L3-2 (CAS 1353016-71-3) and L4-2 (CAS 1425803-45-7) were commercially obtained from Accela.

[chemical structure]

[chemical structure]

### Example 4A: 2-(2-{2-[2-(Cyclooct-2-yn-1-yloxy)acetamido]acetamido}acetamido) acetic acid (L3-3)

[chemical structure]

[0828] To a suspension of peptide L3-1 (Gly-Gly-Gly-OH, 0.34 g, 1.8 mmol) in DMF (13 mL) were added a solution of L3-2 (0.50 g, 1.8 mmol) in THF (6 mL) and DIPEA (0.69 g, 5.4 mmol), and the turbid mixture was stirred at RT for 20 hours. The mixture was filtered, and the clear filtrate solution was concentrated in vacuo and the residue was purified by reversed phase flash chromatography (0-20% acetonitrile in water) to give compound L3-3 (0.13 g, 21% yield) as a white solid. ESI m/z: 354.2 (M+H)⁺. ¹H NMR (400 MHz, DMSO_{d6}) δ 12.6 (s, 1H), 8.20 (t, J=5.6 Hz, 1H), 8.15 (t, J=6.0 Hz, 1H), 7.82 (t, J=5.6 Hz, 1H), 4.35-4.31 (m, 1H), 3.94 (d, J=14.8 Hz, 1H), 3.83-3.73 (m, 7H), 2.29-2.06 (m, 3H), 1.99-1.93 (m, 1H), 1.91-1.71 (m, 3H), 1.63-1.56 (m, 2H), 1.46-1.37 (m, 1H) ppm.

### Example 4B: 2-[2-(2-{2-[2-(Cyclooct-2-yn-1-yloxy)acetamido]acetamido}acetamido)acetamido]-N-[({[(10S,23S)-10-ethyl-18-fluoro-10-hydroxy-19-methyl-5,9-dioxo-8-oxa-4,15-diazahexacyclo[14.7.1.0²,¹⁴.0⁴,¹³0⁶,¹¹.0²⁰,²⁴]tetracosa-1,6(11),12,14,16,18,20(24)-heptaen-23-yl]carbamoyl}methoxy)methyl]acetamide (LP3)

[chemical structure]

[0830] To a yellow solution of compound L3-3 (9.0 mg, 25 μmol) in dry DMF (14 mL) were added DIPEA (9.0 mg, 70 μmol) and HATU (10 mg, 26 μmol), and the mixture was stirred at RT for 30 minutes before the addition of payload P3 (15 mg, 22 μmol). The reaction mixture was stirred at RT for 2 hours until most of starting materials were consumed according to LCMS. The resulting mixture was directly purified by prep-HPLC (0-100% acetonitrile in aq. TFA (0.01%)) to give linker-payload LP3 (8.0 mg, 36% yield, TFA salt) as a light yellow solid. ESI m/z: 915.5 (M+H)⁺. ¹H NMR (400 MHz, DMSO_{d6}) δ 8.68 (t, J=6.6 Hz, 1H), 8.51 (d, J=8.8 Hz, 1H), 8.25-8.12 (m, 3H), 7.86-7.75 (m, 2H), 7.31 (s, 1H), 6.53 (s, 1H), 5.59 (s, 1H), 5.43 (s, 2H), 5.20 (s, 2H), 4.63 (d, J=6.5 Hz, 2H), 4.31 (m, 1H), 4.01 (s, 2H), 3.92 (d, J=14.9 Hz, 1H), 3.75 (m, 9H), 3.18 (s, 2H), 2.40 (s, 3H), 2.26-2.02 (m, 5H), 1.96-1.70 (m, 6H), 1.63-1.53 (m, 2H), 1.39 (d, J=8.7 Hz, 1H), 0.87 (t, J=7.3 Hz, 3H) ppm. ¹⁹F NMR (376 MHz, DMSO_{d6}) δ −74 (TFA), −111 (Ar—F) ppm.

### Example 4C: (2S)-2-{2-[2-(4-{2-Azatricyclo[10.4.0.0⁴,⁹]hexadeca-1(12),4(9),5,7, 13,15-hexaen-10-yn-2-yl}-4-oxobutanamido)acetamido]acetamido}-3-phenyl propanoic acid (L4-3)

[chemical structure]

[0832] To a solution of compound L4-2 (0.28 g, 0.69 mmol) and peptide L4-1 (Gly-Gly-Phe-OH, 0.19 g, 0.69 mmol) in DMF (10 mL) was added DIPEA (0.37 mL, 2.1 mmol), and the reaction mixture was stirred at RT for an hour. Reaction completion was monitored by LCMS. The resulting mixture was directly purified by reversed phase flash chromatography (0-100% acetonitrile in aq. ammonium bicarbonate (10 mM)) to give compound L4-3 (0.31 g, 78% yield) as a white solid. ESI m/z: 567.0 (M+H)⁺.

### Example 4D: 4-{2-Azatricyclo[10.4.0.0⁴,⁹]hexadeca-1(12),4(9),5,7,13,15-hexaen-10-yn-2-yl}-N-{[({[(1 S)-1-[({[({[(10S,23S)-10-ethyl-18-fluoro-10-hydroxy-19-methyl-5,9-dioxo-8-oxa-4,15-diazahexacyclo[14.7.1.0²,¹⁴.0⁴,¹³0⁶,¹¹.0²⁰,²⁴]tetracosa-1,6(11),12,14,16,18,20(24)-heptaen-23-yl]carbamoyl}methoxy)methyl]carbamoyl}methyl)carbamoyl]-2-phenylethyl]carbamoyl}methyl)carbamoyl]methyl}-4-oxobutanamide (LP4)

[chemical structure]

[0834] Following the procedure to make LP3 except substituting L4-3 for L3-3, the linker-payload LP4 with and without ring-opening lactone LP4-RO (14 mg, 56% yield) was obtained as a white solid after purification by prep-HPLC (0-100% acetonitrile in aq. ammonium bicarbonate (10 mM)).

[0835] Lactone: HPLC purity: 75%, retention time: 7.93 min, ESI m/z: 1128.3 (M+H)⁺, 564.8 (M/2+H)⁺; Ring-opening product: HPLC purity: 20%, retention time: 6.94 min, ESI m/z: 1169.4 (M+Na)+, 1146.3 (M+H)⁺.¹H NMR (400 MHz, DMSO_{d6}) δ 8.62 (s, 1H), 8.50 (d, J=8.8 Hz, 1H), 8.28 (s, 1H), 8.18-7.91 (m, 3H), 7.78 (d, J=11.5 Hz, 1H), 7.70-7.58 (m, 2H), 7.50-7.38 (m, 3H), 7.29 (m, 3H), 7.24-7.11 (m, 5H), 6.51 (s, 1H), 5.58 (s, 1H), 5.41 (s, 1H), 5.19 (s, 1H), 4.99 (d, J=13.8 Hz, 1H), 4.62 (d, J=6.1 Hz, 2H), 4.46 (s, 1H), 4.01 (s, 2H), 3.70 (m, 3H), 3.56 (m, 3H), 3.22-3.06 (m, 2H), 2.99 (m, 2H), 2.75 (m, 1H), 2.67 (m, 1H), 2.38 (m, 3H), 2.33 (m, 4H), 2.17 (m, 2H), 2.07 (m, 2H), 1.95-1.70 (m, 2H), 0.86 (t, J=7.2 Hz, 3H) ppm.

### Example 4E: 2-(Cyclooct-2-yn-1-yloxy)-N-{[({[({2-[2-({[(10S,23S)-10-ethyl-18-fluoro-10-hydroxy-19-methyl-5,9-dioxo-8-oxa-4,15-diazahexacyclo[14.7.1.0²,¹⁴.0⁴,¹³0⁶,¹¹.0²⁰,²⁴]tetracosa-1,6(11),12,14,16,18,20(24)-heptaen-23-yl]carbamoyl}methoxy)pyrrolidin-1-yl]-2-oxoethyl}carbamoyl)methyl]carbamoyl}methyl)carbamoyl]methyl}acetamide (diastereoisomer 1, LP7 and diastereoisomer 2, LP7′)

[chemical structure]

[0837] Following the procedure as LP3 except substituting P4 for P3, the diastereoisomers LP7 (with and without ring-opening lactone product, 3.0 mg, 7% yield) and LP7′ (with and without ring-opening lactone product, 4.0 mg, 9.3% yield) were separately obtained as white solids after purification by prep-HPLC (0-100% acetonitrile in aq. ammonium bicarbonate (8 mM) with ammonia (0.05% v)).

[0838] LP7: Lactone: HPLC purity: 11%, retention time: 6.87 min, ESI m/z: 955.3 (M+H)⁺, Ring-opening product: HPLC purity: 89%, retention time: 5.91 min, ESI m/z: 996.5 (M+Na)+¹H NMR (400 MHz, DMSO_{d6}) δ 8.71-8.57 (m, 1H), 8.30-8.13 (m, 2H), 7.99-7.70 (m, 3H), 7.32-6.67 (m, 2H), 5.63-5.48 (m, 1H), 5.43-5.01 (m, 5H), 4.36-4.27 (m, 1H), 4.21-3.68 (m, 10H), 2.40-2.24 (m, 4H), 2.14-1.33 (m, 22H), 1.14-0.97 (m, 2H), 0.89-0.84 (m, 3H) ppm. ¹⁹F NMR (376 MHz, DMSO_{d6}) δ −111, −112 ppm.

[0839] LP7′: Lactone: HPLC purity: 21%, retention time: 6.98 min, ESI m/z: 955.3 (M+H)⁺, Ring-opening product: HPLC purity: 79%, retention time: 6.02 min, ESI m/z: 996.5 (M+Na)+¹H NMR (400 MHz, DMSO_{d6}) δ 8.60-8.55 (m, 1H), 8.31-7.69 (m, 5H), 7.32-7.21 (m, 1H), 6.66-6.53 (m, 1H), 5.64-5.56 (m, 1H), 5.43-5.09 (m, 5H), 4.32-4.30 (m, 1H), 4.16-4.02 (m, 2H), 3.98-3.89 (m, 2H), 3.82-3.55 (m, 6H), 2.40-2.31 (m, 4H), 2.22-1.36 (m, 22H), 1.15-0.98 (m, 2H), 0.89-0.84 (m, 3H) ppm. ¹⁹F NMR (376 MHz, DMSO_{d6}) δ −111, −112 ppm.

### Example 4F: 2-[2-(2-{2-[2-(Cyclooct-2-yn-1-yloxy)acetamido]acetamido}acetamido)acetamido]-N-[({[(10S,23S)-10-ethyl-18-fluoro-10-hydroxy-19-methyl-5,9-dioxo-8-oxa-4,15-diazahexacyclo[14.7.1.0²,¹⁴.0⁴,¹³0⁶,¹¹.0²⁰,²⁴]tetracosa-1,6(11),12,14,16,18,20(24)-heptaen-23-yl]carbamoyl}methoxy)methyl]acetamide (LP9)

[chemical structure]

[0841] To a yellow solution of compound L3-3 (Example 4A) (9.0 mg, 25 μmol) in dry DMF (14 mL) were added DIPEA (9.0 mg, 70 μmol) and HATU (10 mg, 26 μmol), and the mixture was stirred at room temperature for 30 minutes before the addition of payload P (15 mg, 22 μmol). The reaction mixture was stirred at room temperature for 2 hours until most of starting materials were consumed according to LCMS. The resulting mixture was directly purified by prep-HPLC (0-100% acetonitrile in aq. TFA (0.01%)) to give linker-payload LP9 (8.0 mg, 36% yield, TFA salt) as a light yellow solid. ESI m/z: 915.5 (M+H)⁺. ¹H NMR (400 MHz, DMSO_{d6}) δ 8.68 (t, J=6.6 Hz, 1H), 8.51 (d, J=8.8 Hz, 1H), 8.25-8.12 (m, 3H), 7.86-7.75 (m, 2H), 7.31 (s, 1H), 6.53 (s, 1H), 5.59 (s, 1H), 5.43 (s, 2H), 5.20 (s, 2H), 4.63 (d, J=6.5 Hz, 2H), 4.31 (m, 1H), 4.01 (s, 2H), 3.92 (d, J=14.9 Hz, 1H), 3.75 (m, 9H), 3.18 (s, 2H), 2.40 (s, 3H), 2.26-2.02 (m, 5H), 1.96-1.70 (m, 6H), 1.63-1.53 (m, 2H), 1.39 (d, J=8.7 Hz, 1H), 0.87 (t, J=7.3 Hz, 3H) ppm. ¹⁹F NMR (376 MHz, DMSO_{d6}) δ −74 (TFA), −111 (Ar—F) ppm.

### Example 5: Synthesis of acid-sensitive linker-payloads

[0842] Linker-payload LP8 was synthesized as described in Scheme 6 and as further described below.

[0843] Starting material L2-1 (CAS 1427004-19-0) was commercially obtained from Accela.

[chemical structure]

### 1-(4-{2-Azatricyclo[10.4.0.0⁴,⁹]hexadeca-1(12),4(9),5,7,13,15-hexaen-10-yn-2-yl}-4-oxobutanamido)-N-{2-[2-({[(10S,23S)-10-ethyl-18-fluoro-10-hydroxy-19-methyl-5,9-dioxo-8-oxa-4,15-diazahexacyclo[14.7.1.0²,¹⁴.0⁴,¹³0⁶,¹¹.0²⁰,²⁴]tetracosa-1,6(11),12,14,16,18,20(24)-heptaen-23-yl]carbamoyl}methoxy)pyrrolidin-1-yl]-2-oxoethyl}-3,6,9,12-tetraoxapentadecan-15-amide (LP8)

[chemical structure]

[0845] To a solution of payload P4 (6.2 mg, 10 μmol) in DMF (1.0 mL) were added compound L2-1 (6.5 mg, 10 μmol) and DIPEA (3.9 mg, 30 μmol), and the reaction mixture was stirred at RT for 2 hours. Reaction completion was monitored by LCMS. The resulting mixture was directly purified by prep-HPLC (5-95% acetonitrile in aq. ammonium bicarbonate (10 mM)) to give linker-payload LP8 (with lactone ring-opening product, 3.0 mg, 26% yield) as a yellow solid.

[0846] Lactone: HPLC purity: 80%, retention time: 8.12 min, ESI m/z: 577.6 (M/2+H)⁺; Ring-opening product: HPLC purity: 20%, retention time: 6.91 min, ESI m/z: 586.7(M/2+H)⁺.

[0847] ¹H NMR (400 MHz, DMSO_{d6}) δ 7.74-7.67 (m, 2H), 7.63-7.58 (m, 1H), 7.56-7.52 (m, 1H), 7.44-7.36 (m, 3H), 7.32-7.20 (m, 4H), 6.60-6.44 (m, 1H), 5.56-5.49 (m, 1H), 5.34 (s, 2H), 5.28-5.16 (m, 1H), 5.11-5.06 (m, 1H), 4.98-4.92 (m, 1H), 4.10-3.91 (m, 2H), 3.75-3.74 (m, 1H), 3.55-3.50 (m, 3H), 3.40-3.37 (m, 13H), 3.22-3.16 (m, 5H), 3.02-2.99 (m, 3H), 2.54-2.48 (m, 2H), 2.31 (d, J=2.8 Hz, 2H), 2.22-2.11 (m, 4H), 1.96-1.88 (m, 4H), 1.82-1.72 (m, 2H), 1.67-1.64 (m, 2H), 1.01 (t, J=7.2 Hz, 2H), 0.92 (t, J=7.2 Hz, 2H), 0.82-0.76 (m, 3H) ppm. ¹⁹F NMR (376 MHz, DMSO_{d6}) δ −111 ppm.

### Example 6: Synthesis of Glucose Linker-Payloads

[0848] Linker-payloads LP5 and LP6 were synthesized as described in Schemes 7A-7B and Examples 6A-6N, below.

[chemical structure]

[chemical structure]

[chemical structure]

### Example 6A: N-(2-Aminoethyl)-2-(cyclooct-2-yn-1-yloxy)acetamide (L5-1)

[chemical structure]

[0850] To a solution of ethylenediamine (0.71 g, 12 mmol) in DMF (2.0 mL) were added DIPEA (0.30 g, 2.4 mmol) and a solution of compound L3-2 (0.33 g, 1.2 mmol) in DMF (3.0 mL) slowly, and the mixture was stirred at RT for 30 min. Reaction completion was monitored by LCMS. The resulting mixture was purified by reversed phase flash chromatography (0-100% acetonitrile in aq. ammonium bicarbonate (0.8 mM)) to give compound L5-1 (0.18 g, 68% yield) as colorless oil. ESI m/z: 225.2 (M+H)⁺. ¹H NMR (400 MHz, DMSO_{d6}) δ 7.74-7.63 (m, 1H), 4.28 (t, J=5.8 Hz, 1H), 3.88-3.73 (m, 2H), 3.11-3.00 (m, 4H), 2.58 (t, J=6.4 Hz, 2H), 2.27-2.06 (m, 3H), 1.94-1.71 (m, 4H), 1.66-1.54 (m, 2H), 1.45-1.33 (m, 1H) ppm.

### Example 6B: Methyl (2S,3S,4S,5R,6S)-3,4,5-tris(acetyloxy)-6-[2-({2-[2-(cyclooct-2-yn-1-yloxy)acetamido]ethyl}carbamoyl)-4-(hydroxymethyl)phenoxy]oxane-2-carboxylate (L5-3)

[chemical structure]

[0852] To a mixture of compound L5-2 (synthesized according to WO2018182341A1, incorporated by reference herein in its entirety) (0.11 g, 0.23 mmol) and HATU (96 mg, 0.25 mmol) in dry DMF (4 mL) were added compound L5-1 (51 mg, 0.23 mmol) and DIPEA (89 mg, 0.69 mmol), and the reaction mixture was stirred at RT for 2 hours until L5-2 was totally consumed, which was monitored by LCMS. The resulting mixture was directly purified by reversed phase flash chromatography (0-100% acetonitrile in aq. TFA (0.01%)) to give compound L5-3 (0.14 g, 90% yield) as a white solid. ESI m/z: 691.4 (M+H)⁺. ¹H NMR (400 MHz, CDCl₃) δ 8.06-8.04 (m, 1H), 7.64-7.59 (m, 1H), 7.50-7.47 (m, 1H), 7.22-7.18 (m, 1H), 7.01-6.98 (m, 1H), 5.44-5.28 (m, 5H), 4.68 (s, 2H), 4.30-4.21 (m, 2H), 4.10-4.06 (m, 1H), 3.93-3.88 (m, 1H), 3.75 (s, 3H), 3.67-3.48 (m, 2H), 2.21-2.07 (m, 15H), 1.93-1.79 (m, 3H), 1.70-1.38 (m, 3H) ppm.

### Example 6C: Methyl (2S,3S,4S,5R,6S)-3,4,5-tris(acetyloxy)-6-[2-({2-[2-(cyclooct-2-yn-1-yloxy)acetamido]ethyl}carbamoyl)-4-{[(4-nitrophenoxycarbonyl)oxy]methyl} phenoxy]oxane-2-carboxylate (L5-4)

[chemical structure]

[0854] To a solution of compound L5-3 (0.14 g, 0.20 mmol) in DMF (2.0 mL) were added bis(4-nitrophenyl) carbonate (55 mg, 0.18 mmol) and DIPEA (26 mg, 0.20 mmol) at 0° C. under nitrogen. The reaction mixture was stirred at 0° C. for 30 min and then at RT for 3 hours. The reaction mixture was diluted with water (10 mL) and extracted with ethyl acetate (20 mL×3). The combined organic solution was washed with brine (10 mL), dried over anhydrous sodium sulfate and concentration in vacuo. The residue was purified by flash chromatography (40-60% ethyl acetate in petroleum ether) to give compound L5-4 (85 mg, 49% yield) as colorless oil. ESI m/z: 856.0 (M+H)⁺.

### Example 6D: Methyl (2S,3S,4S,5R,6S)-3,4,5-tris(acetyloxy)-6-[2-({2-[2-(cyclooct-2-yn-1-yloxy)acetamido]ethyl}carbamoyl)-4-({[({[({[(10S,23S)-10-ethyl-18-fluoro-10-hydroxy-19-methyl-5,9-dioxo-8-oxa-4,15-diazahexacyclo[14.7.1.0²,¹⁴.0⁴,¹³0⁶,¹¹.0²⁰,²⁴]tetracosa-1,6(11),12, 14,16,18,20(24)-heptaen-23-yl]carbamoyl}methoxy)methyl]carbamoyl}methyl) carbamoyl]oxy}methyl)phenoxy]oxane-2-carboxylate (L5-5)

[chemical structure]

[0856] To a solution of compound L5-4 (17 mg, 20 μmol) in DMF (1.0 mL) were added P3 (12 mg, 20 μmol), HOBt (2.7 mg, 20 μmol) and DIPEA (5.1 mg, 40 μmol). The reaction mixture was stirred at RT for 16 hours, which was monitored by LCMS. The resulting mixture was directly purified by reversed phase flash chromatography (0-100% acetonitrile in aq. TFA (0.01%)) to give compound L5-5 (13 mg, 20% yield) as a yellow solid. ESI m/z: 649.0 (M/2+H)⁺.

### Example 6E: (2S,3S,4S,5R,6S)-6-[2-({2-[2-(Cyclooct-2-yn-1-yloxy)acetamido]ethyl}carbamoyl)-4-({[({[({[(10S,23S)-10-ethyl-18-fluoro-10-hydroxy-19-methyl-5,9-dioxo-8-oxa-4,15-diazahexacyclo[14.7.1.0²,¹⁴.0⁴,¹³0⁶,¹¹.0²⁰,²⁴]tetracosa-1,6(11),12,14,16,18,20(24)-heptaen-23-yl]carbamoyl}methoxy)methyl]carbamoyl}methyl)carbamoyl]oxy}methyl)phenoxy]-3,4,5-trihydroxyoxane-2-carboxylic acid (LP5)

[chemical structure]

[0858] To a mixture of compound L5-5 (13 mg, 10 μmol) in methanol (2 mL) was added aq. lithium hydroxide (0.1 M, 2 mL), and the mixture was stirred at RT for an hour. Reaction completion was monitored by LCMS. After quenching with aq. HCl (1 N) to pH 4, the resulting mixture was purified by reversed phase flash chromatography (5-95% acetonitrile in aq. TFA (0.01%)) to give linker-payload LP5 (5 mg, 43% yield) as a white solid. ESI m/z: 1156.3 (M+H)⁺.

### Example 6F: [(2R,3R,4S,5R,6S)-3,4,5-Tris(acetyloxy)-6-[2-({2-[2-(cyclooct-2-yn-1-yloxy)acetamido]ethyl}carbamoyl)-4-(hydroxymethyl)phenoxy]oxan-2-yl]methyl acetate (L6-3)

[chemical structure]

[0860] Following the procedure to make L5-3 except substituting L6-2 for L5-2, compound L6-3 (0.10 g, 80% yield) was obtained as a white solid. ESI m/z: 705.3 (M+H)⁺.

### Example 6G: [(2R,3R,4S,5R,6S)-3,4,5-Tris(acetyloxy)-6-[2-({2-[2-(cyclooct-2-yn-1-yloxy)acetamido]ethyl}carbamoyl)-4-{[(4-nitrophenoxycarbonyl)oxy]methyl}phenoxy]oxan-2-yl]methyl acetate (L6-4)

[chemical structure]

[0862] Following the procedure to make L5-4 except substituting L6-3 for L5-3, compound L6-4 (62 mg, 50% yield) was obtained as a white solid. ESI m/z: 870.3 (M+H)⁺.

### Example 6H: [(2R,3R,4S,5R,6S)-3,4,5-Tris(acetyloxy)-6-[2-({2-[2-(cyclooct-2-yn-1-yloxy)acetamido]ethyl}carbamoyl)-4-({[({[({[(10S,23S)-10-ethyl-18-fluoro-10-hydroxy-19-methyl-5,9-dioxo-8-oxa-4,15-diazahexacyclo[14.7.1.0²,¹⁴.0⁴,¹³0⁶,¹¹.0²⁰,²⁴]tetracosa-1,6(11),12,14,16,18,20(24)-heptaen-23-yl]carbamoyl}methoxy)methyl]carbamoyl}methyl) carbamoyl]oxy}methyl) henoxy]oxan-2-yl]methyl acetate (L6-5)

[chemical structure]

[0864] Following the procedure to make L5-5 except substituting L6-4 for L5-4, compound L6-5 (30 mg, 66% yield) was obtained as a white solid. ESI m/z: 655.7 (M/2+H)⁺.

### Example 61: [3-({2-[2-(Cyclooct-2-yn-1-yloxy)acetamido]ethyl}carbamoyl)-4-{[(2S,3R,4S,5S,6R)-3,4,5-trihydroxy-6-(hydroxymethyl)oxan-2-yl]oxy}phenyl]methyl N-({[({[(10S,23S)-10-ethyl-18-fluoro-10-hydroxy-19-methyl-5,9-dioxo-8-oxa-4,15-diazahexacyclo[14.7.1.0²,¹⁴.0⁴,¹³0⁶,¹¹.0²⁰,²⁴]tetracosa-1,6(11),12,14,16,18,20(24)-heptaen-23-yl]carbamoyl}methoxy)methyl]carbamoyl}methyl)carbamate (LP6)

[chemical structure]

[0866] Following the procedure to make LP5 except substituting L6-5 for L5-5, linker-payload LP6 (9 mg, 34% yield) was obtained as a white solid. ESI m/z: 1142.3 (M+H)⁺.

### Example 6J: Benzyl 2-({2-[2-({[(9H-fluoren-9-yl)methoxy]carbonyl}amino) acetamido]acetamido}methoxy)acetate (GP-2)

[chemical structure]

[0868] To a solution of compound GP-1 (CAS: 1599440-07-9, synthesized according to WO 2014057687, 0.20 g, 0.42 mmol) in DMF (5 mL) was added diethylamine (0.15 g, 2.1 mmol), and the reaction mixture was stirred at room temperature overnight, which was monitored by LCMS. The resulting mixture was directly separated by reversed phase flash chromatography (0-100% acetonitrile in aq. ammonium bicarbonate (0.05%)) to give a white solid (0.1 g, ESI m/z: 253.1), which was added into a mixture of Fmoc-glycine (0.14 g, 0.48 mmol) and HATU (0.23 g, 0.59 mmol) in DMF (5 mL), followed by the addition of DIPEA (0.15 g, 0.59 mmol). The reaction mixture was stirred at room temperature for 4 hours, which was monitored by LCMS. The resulting mixture was directly purified by prep-HPLC (10-95% acetonitrile in aq. TFA (0.05%)) to give compound GP-2 (0.14 g, 64% yield) as a white solid. ESI m/z: 554.3 (M+Na)⁺.

### Example 6K: 2-({2-[2-({[(9H-Fluoren-9-yl)methoxy]carbonyl}amino)acetamido]acetamido} methoxy)acetic acid (GP-3)

[chemical structure]

[0870] To a solution of compound GP-2 (0.10 g, 0.19 mmol) in ethyl acetate (10 mL) was added palladium on carbon (0.10 g) under nitrogen protection. The reaction mixture was stirred under hydrogen balloon at room temperature for 4 hours, which was monitored by LCMS. The resulting mixture was filtered through celite and the filtrate was concentrated in vacuo to give compound GP-3 (56 mg, 65% yield) as a white solid. ESI m/z (weak): 464.0 (M+Na)⁺.

### Example 6L: 2-Amino-N-({[({[(10S,23S)-10-ethyl-18-fluoro-10-hydroxy-19-methyl-5,9-dioxo-8-oxa-4,15-diazahexacyclo[14.7.1.0²,¹⁴.0⁴,¹³0⁶,¹¹.0²⁰,²⁴]tetracosa-1,6(11),12,14,16,18,20(24)-heptaen-23-yl]carbamoyl}methoxy)methyl]carbamoyl}methyl)acetamide (Gly-P3)

[chemical structure]

[0872] To a solution of compound GP-3 (41 mg, 93 μmol) in dry DMF (5 mL) were added HATU (39 mg, 0.10 mmol), exatecan (mesylate, 41 mg, 93 μmol) and DIPEA (36 mg, 0.28 mmol) successively, and the reaction mixture was stirred at room temperature for 2 hours, which was monitored by LCMS. The resulting mixture was separated by reversed phase flash chromatography (0-100% acetonitrile in aq. TFA (0.01%)) to give Fmoc-Gly-P3 (50 mg, 63% yield, ESI m/z: 859.0) as a white solid, which was dissolved in DMF (5 mL). To the solution was added diethylamine (20 mg, 0.27 mmol), and the mixture was stirred at room temperature overnight. The resulting mixture was separated by reversed phase flash chromatography (0-100% acetonitrile in aq. TFA (0.01%)) to give Gly-P3 (TFA salt, 40 mg, 57% yield from exatecan) as a white solid. ESI m/z: 637.3 (M+H)⁺.

### Example 6M: Methyl (2S,3S,4S,5R,6S)-3,4,5-tris(acetyloxy)-6-[2-({2-[2-(cyclooct-2-yn-1-yloxy) acetamido]ethyl}carbamoyl)-4-{[({[({[({[(10S,23S)-10-ethyl-18-fluoro-10-hydroxy-19-methyl-5,9-dioxo-8-oxa-4, 15-diazahexacyclo[14.7.1.0²,¹⁴.0⁴,¹³0⁶,¹¹.0²⁰,²⁴]tetracosa-1,6(11),12,14,16, 18,20(24)-heptaen-23-yl]carbamoyl} methoxy)methyl]carbamoyl}methyl) carbamoyl]methyl} carbamoyl)oxy]methyl}phenoxy]oxane-2-carboxylate (LP12-5)

[chemical structure]

[0874] Following the similar procedure as LP10-5 except substituting Gly-P3 for P3, compound LP12-5 (23 mg, 39% yield) was obtained as a yellow solid. ESI m/z: 860.5 (M−M_{DXD}+H)⁺, 677.4 (M/2+H)⁺.

### Example 6N: (2S,3S,4S,5R,6S)-6-[2-({2-[2-(Cyclooct-2-yn-1-yloxy)acetamido]ethyl}carbamoyl)-4-{[({[({[({[(10S,23S)-10-ethyl-18-fluoro-10-hydroxy-19-methyl-5,9-dioxo-8-oxa-4,15-diazahexacyclo [14.7.1.0²,¹⁴.0⁴,¹³0⁶,¹¹.0²⁰,²⁴]tetracosa-1,6(11),12,14,16,18,20(24)-heptaen-23-yl]carbamoyl}methoxy) methyl]carbamoyl}methyl)carbamoyl]methyl}carbamoyl)oxy]methyl}phenoxy]-3,4,5-trihydroxyoxane-2-carboxylic acid (LP12)

[chemical structure]

[0876] Following the similar procedure as LP10 except substituting LP12-5 for LP10-5, linker-payload LP12 (3 mg, 27% yield) was obtained as a white solid. ESI m/z: 607.4 (M/2+H)⁺.

[0877] ¹H NMR (400 MHz, DMSO_{d6}) δ 8.72 (t, J=6.5 Hz, 1H), 8.62-8.49 (m, 2H), 8.19 (t, J=5.1 Hz, 1H), 7.98-7.90 (m, 1H), 7.82-7.71 (m, 2H), 7.53 (t, J=6.0 Hz, 1H), 7.47-7.41 (m, 1H), 7.37-7.28 (m, 2H), 6.56 (s, 1H), 5.69-5.55 (m, 2H), 5.43 (s, 2H), 5.20 (s, 3H), 4.99 (s, 2H), 4.89 (d, J=5.9 Hz, 1H), 4.63 (d, J=6.8 Hz, 2H), 4.31-4.23 (m, 1H), 4.01 (s, 2H), 3.87 (d, J=14.8 Hz, 1H), 3.78-3.61 (m, 4H), 3.29-3.12 (m, 5H), 2.39 (s, 3H), 2.26-2.10 (m, 4H), 2.06-1.96 (m, 2H), 1.94-1.78 (m, 4H), 1.77-1.65 (m, 2H), 1.61-1.42 (m, 3H), 1.38-1.18 (m, 6H), 0.90-0.83 (m, 3H) ppm. (The proton of acid was not revealed.) ¹⁹F NMR (376 MHz, DMSO_{d6}) δ −111.3 ppm.

### Example 7: Synthesis of Branched Linker-Payloads (BL2P)

### Example 7A: Synthesis of Branch Linker Key Intermediate II

[0878] The key intermediates II were synthesized as described in Scheme 8 and in Examples 7A-7B below. Scheme 9 provides commercial starting materials utilized in the syntheses.

[chemical structure]

TABLE 12
Commercial OSu materials Ib, Ic and Ih:

| | | |
|---|---|---|
| Ib | [chemical structure] | 1425803-45-7 |
| Ic | [chemical structure] | 1353016-71-3 |
| Ih | [chemical structure] | 2101206-22-6 |

### Example 7B: General procedure for intermediate II

[0879] To a solution of active ester 1 (1.0 equiv.) in DMF (0.4 M) were added DIPEA (3.0 equiv.) and branch amine II-1 (1.0 equiv.). The resulting mixture was stirred at room temperature for 3 hours, which was monitored by LCMS. The resulting mixture was directly purified by reversed phase flash chromatography (0-70% acetonitrile in water) to give II-2 as a white solid, which was dissolved in THF (0.5 M). To the solution were added water (V_{H2O}:V_{THF}=1:1) and lithium hydroxide hydrate (4 equiv. of 11-2). The reaction mixture was stirred at room temperature for 3 hours, which was monitored by LCMS. The resulting mixture was directly separated by reversed phase flash chromatography (0-70% acetonitrile in water) to give compound 11-3 as a white solid, which was dissolved in water (0.1 M). To the solution were added acetonitrile (V_{acetonitrile}:V_{H2O}=1:1), pentafluorophenol (2.0 equiv. of 11-3) and DIC (2.0 equiv. of 11-3), and the reaction mixture was stirred at room temperature for 3 hours, which was monitored by LCMS. The resulting mixture was directly purified by reversed phase flash chromatography (10-99% acetonitrile in water) to give key intermediate II as colorless oil.

TABLE 13
Starting materials II#-1 and Branch-linler intermediates II

| Starting materials II#-1 | | | | | Branch linker intermediates | | |
|---|---|---|---|---|---|---|---|
| | | CAS | OSu | | | | ESI |
| # | Structure | Sources | # | # | Structures | yield | m/z |
| II2- 1 | [chemical structure] | 6290- 05-7 Com- mer- cial | Ib | II2b | [chemical structure] | 17% | 630.2 (M + H)⁺, 652.2 (M + Na)⁺. |
| | | | Ic | II2c | [chemical structure] | 17% | 753.2 (M + H)⁺, 775.2 (M + Na)⁺ |
| II3- 1 | [chemical structure] | 944163- 34-2 Synthe- sized as Tetra- hedron 63 (2007) 5539- 5547 | Ib | II3b | [chemical structure] | 24% | 805.3 (M + H)⁺, 827.3 (M + Na)⁺ |
| | | | Ic | II3c | [chemical structure] | 11% | 928.3 (M + H)⁺ |
| II4- 1 | [chemical structure] | 2404597- 22-2 Synthe- sized as WO- 20191996 21 | Ib | II4b | [chemical structure] | 24% | 732.0 (M + H)⁺, 754.0 (M + Na)⁺ |
| | | | Ih | II4A b | [chemical structure] | 12% | 891.3 (M + H)⁺, 913.3 (M + Na)⁺ |
| II5- 1 | [chemical structure] | 166047- 75-2 Synthe- sized as WO- 20191996 21 | Ih | II5A b | [chemical structure] | 12% | 1181.3 (M + Na)⁺. |

### Example 7C: Synthesis of Intermediate II3f

[chemical structure]

### 2,3,4,5,6-Pentafluorophenyl 1-({[(9H-fluoren-9-yl)methoxy]carbonyl}amino)-12-[2-oxo-2-(2,3,4,5,6-pentafluorophenoxy)ethyl]-3,6,9-trioxa-12-azatetradecan-14-oate (II3f)

[chemical structure]

[0882] To a solution of II3-1 (2.6 g, 7.0 mmol in methano mL) was added aq. sodium hydroxide (1.4 M, 20 mL, and the reaction mixture was stirred at room temperature for 4 hours, which was monitored by LCMS. The resulting mixture was washed with diluted aq. hydrochloride (1.0 M, 50 mL×3), water (100 mL) and brine (100 mL). The organic solution was dried over anhydrous sodium sulfate and concentrated in vacuo to give II3f-1 (2.2 g, crude) as colorless oil. ESI m/z: 309.3 (M+H)⁺

[0883] To a solution of II3f-1 (0.10 g, crude) in DMF (10 mL) were added Fmoc-OSu (CAS: 82911-69-1, 0.11 g, 0.32 mmol) and DIPEA (0.13 g, 1.0 mmol), and the mixture was stirred at room temperature for an hour, which was monitored by LCMS. The resulting mixture was directly purified by reversed phase flash chromatography (0-100% acetonitrile in aq. TFA (0.03%)) to give II3f-2 (0.15 g, 90% yield) as a white solid. ESI m/z: 531.3 (M+H)⁺.

[0884] To a mixture of II3f-2 (50 mg, 94 μmol) in DCM (10 mL) were added pentafluorophenol (35 mg, 0.19 mmol) and DIC (24 mg, 0.19 mmol), and the reaction mixture was stirred at room temperature for 2 hours, which was monitored by LCMS. The resulting mixture was concentrated in vacuo to give II3f (56 mg, 69% yield) as colorless oil, which was used directly without further purification. ESI m/z: 863.2 (M+H)⁺.

### Example 7D: Synthesis of Branched Linker-P3

[0885] Scheme 10. Synthesis of Linear vcPAB Linker-P (LP1, LP2, LP20, LP22, LP24) and Branch vcPAB Linker-P (LP24-31, LP36-38, LP41)

[chemical structure]

[chemical structure]

### Example 7E: General Procedure for LP24-LP42

[0886] To a solution of intermediate II (1 equiv.) in DMF (3 mM) were added DIPEA (10 equiv.) and amino linker-payload (2-3 equiv., except 4.0 equiv. for LP41), and the reaction mixture was stirred at room temperature for an hour until amino linker-payload was totally consumed, which was monitored by LCMS. The resulting mixture was purified by prep-HPLC to provide branched linker-payload as a white solid.

### Example 7F: {4-[(2S)-5-(Carbamoylamino)-2-[(2S)-2-(3-{2-[2-(2-{N-[({2-[2-(2-{[(1S)-1-{[(1S)-4-(carbamoylamino)-1-{[4-({[({[({[(10S,23S)-10-ethyl-18-fluoro-10-hydroxy-19-methyl-5,9-dioxo-8-oxa-4,15-diazahexacyclo[14.7.1.0²,¹⁴.0⁴,¹³0⁶,¹¹.0²⁰,²⁴]tetracosa-1,6(11),12,14,16,18,20(24)-heptaen-23-yl]carbamoyl}methoxy)methyl]carbamoyl}methyl)carbamoyl]oxy}methyl)phenyl]carbamoyl}butyl]carbamoyl}-2-methylpropyl] carbamoyl}ethoxy)ethoxy]ethyl}carbamoyl)methyl]-2-(cyclooct-2-yn-1-yloxy)acetamido}acetamido)ethoxy] ethoxy}propanamido)-3-methylbutanamido]pentanamido]phenyl}methyl N-({[({[(10S,23S)-10-ethyl-18-fluoro-10-hydroxy-19-methyl-5,9-dioxo-8-oxa-4,15-diazahexacyclo[14.7.1.0²,¹⁴.0⁴,¹³0⁶,¹¹.0²⁰,²⁴]tetracosa-1,6(11), 12,14,16,18,20(24)-heptaen-23-yl]carbamoyl}methoxy)methyl]carbamoyl}methyl)carbamate (LP24)

[chemical structure]

[0888] Following the general procedure from LP13 (42 mg, 32 μmol) and intermediate II2b (10 mg, 16 μmol), branched linker-payload LP24 (20 mg, 44% yield) was obtained as a white solid after purification by prep-HPLC (5-95% acetonitrile in aq. TFA (0.05%)). ESI m/z: 850.8 (M/3+H)⁺. ¹H NMR (400 MHz, DMSO_{d6}) δ 10.0 (s, 2H), 8.81-8.78 (m, 2H), 8.64 (d, J=5.6 Hz, 1H), 8.50 (d, J=9.2 Hz, 2H), 8.25 (d, J=4.8 Hz, 1H), 8.13 (d, J=7.2 Hz, 2H), 7.88 (d, J=8.8 Hz, 2H), 7.78 (d, J=10.4 Hz, 2H), 7.58 (d, J=8.4 Hz, 4H), 7.42 (t, J=6.0 Hz, 2H), 7.31 (s, 2H), 7.27 (d, J=8.4 Hz, 4H), 6.03-5.96 (m, 2H), 5.62-5.57 (m, 2H), 5.46-5.36 (m, 6H), 5.24-5.14 (m, 4H), 4.92 (s, 4H), 4.63 (d, J=6.4 Hz, 4H), 4.42-4.35 (m, 2H), 4.27-4.22 (m, 3H), 4.14 (d, J=14.4 Hz, 1H), 4.02-3.99 (m, 6H), 3.94 (d, J=14.0 Hz, 1H), 3.87 (s, 2H), 3.63-3.57 (m, 9H), 3.51-3.46 (m, 8H), 3.25-3.18 (m, 6H), 3.18-3.05 (m, 2H), 3.02-2.98 (m, 2H), 2.98-2.89 (m, 2H), 2.47-2.45 (m, 2H), 2.41-2.35 (m, 8H), 2.23-2.12 (m, 8H), 2.03-1.91 (m, 4H), 1.86-1.76 (m, 8H), 1.76-1.63 (m, 4H), 1.63-1.51 (m, 5H), 1.45-1.32 (m, 6H), 0.88-0.81 (m, 18H) ppm. (Proton of CF3000H was not revealed) ¹⁹F NMR (376 MHz, DMSO_{d6}) δ −111, −74 ppm.

### Example 7G: (4R)-4-{[(1S)-1-{[(1 S)-4-(Carbamoylamino)-1-{[4-({[({[({[(10S,23S)-10-ethyl-18-fluoro-10-hydroxy-19-methyl-5,9-dioxo-8-oxa-4,15-diazahexacyclo[14.7.1.0²,¹⁴.0⁴,¹³0⁶,¹¹.0²⁰,²⁴]tetracosa-1,6(11),12,14,16,18,20(24)-heptaen-23-yl]carbamoyl}methoxy)methyl]carbamoyl}methyl)carbamoyl]oxy}methyl)phenyl]carbamoyl}butyl]carbamoyl}-2-methylpropyl]carbamoyl}-4-(3-{2-[2-(2-{N-[({2-[2-(2-{[(1R)-1-{[(1 S)-1-{[(1 S)-4-(carbamoylamino)-1-{[4-({[({[({[(10S,23S)-10-ethyl-18-fluoro-10-hydroxy-19-methyl-5,9-dioxo-8-oxa-4,15-diazahexacyclo[14.7.1.0²,¹⁴.0⁴,¹³0⁶,¹¹.0²⁰,²⁴]tetracosa-1,6(11),12,14,16,18,20(24)-heptaen-23-yl]carbamoyl}methoxy)methyl]carbamoyl}methyl)carbamoyl]oxy}methyl)phenyl]carbamoyl}butyl]carbamoyl}-2-methylpropyl]carbamoyl}-3-carboxypropyl]carbamoyl}ethoxy)ethoxy]ethyl}carbamoyl)methyl]-2-(cyclooct-2-yn-1-yloxy)acetamido}acetamido)ethoxy]ethoxy}propanamido)butanoic acid (LP25)

[chemical structure]

[0890] Following the general procedure from LP13 (24 mg, 19 μmol) and intermediate II2b (4.0 mg, 6.4 μmol), branched linker-payload LP25 (6 mg, 33% yield) was obtained as a white solid after purification by prep-HPLC (10-95% acetonitrile in aq. TFA (0.05%)). ESI m/z: 936.7 (M/3+H)⁺. ¹H NMR (400 MHz, DMSO_{d6}) δ 9.79 (br s, 2H), 8.80 (t, J=6.4 Hz, 2H), 8.69 (br s, 1H), 8.51 (d, J=8.4 Hz, 2H), 8.33-8.26 (m, 2H), 8.18-8.14 (m, 2H), 8.12-8.06 (m, 2H), 7.78 (d, J=11.2 Hz, 2H), 7.63-7.59 (m, 4H), 7.43 (t, J=6.0 Hz, 2H), 7.30 (s, 2H), 7.27 (d, J=8.0 Hz, 4H), 6.53 (br s, 2H), 6.08-6.01 (m, 2H), 5.62-5.57 (m, 2H), 5.48-5.44 (m, 4H), 5.41 (s, 4H), 5.19 (s, 4H), 4.92 (s, 4H), 4.63 (d, J=6.4 Hz, 4H), 4.37-4.31 (m, 4H), 4.27-4.11 (m, 5H), 4.03-3.98 (m, 6H), 3.96-3.91 (m, 1H), 3.86 (s, 2H), 3.64-3.60 (m, 4H), 3.53-3.49 (m, 2H), 3.47-3.42 (m, 10H), 3.25-3.18 (m, 8H), 3.15-3.10 (m, 2H), 3.04-2.92 (m, 5H), 2.38 (s, 8H), 2.21-2.11 (m, 12H), 2.07-1.98 (m, 4H), 1.88-1.75 (m, 13H), 1.67-1.61 (m, 2H), 1.57-1.53 (m, 2H), 1.47-1.34 (m, 6H), 0.89-0.81 (m, 20H) ppm. ¹⁹F NMR (376 MHz, DMSO_{d6}) −71.08, −111.30 ppm.

### Example 7H: {4-[(2S)-2-[(2S)-2-{1-[2-(4-{2-Azatricyclo[10.4.0.0⁴,⁹]hexadeca-1(12),4(9),5,7,13,15-hexaen-10-yn-2-yl}-N-{[(14-{[(1 S)-1-{[(1 S)-4-(carbamoylamino)-1-{[4-({[({[({[(10S,23S)-10-ethyl-18-fluoro-10-hydroxy-19-methyl-5,9-dioxo-8-oxa-4,15-diazahexacyclo[14.7.1.0²,¹⁴.0⁴,¹³0⁶,¹¹.0²⁰,²⁴]tetracosa-1,6(11),12, 14,16,18,20(24)-heptaen-23-yl]carbamoyl}methoxy)methyl]carbamoyl}methyl)carbamoyl]oxy}methyl) phenyl]carbamoyl}butyl]carbamoyl}-2-methylpropyl]carbamoyl}-3,6,9,12-tetraoxatetradecan-1-yl)carbamoyl]methyl}-4-oxobutanamido)acetamido]-3,6,9,12-tetraoxapentadecan-15-amido}-3-methylbutanamido]-5-(carbamoylamino) pentanamido]phenyl}methyl N-({[({[(10S,23S)-10-ethyl-18-fluoro-10-hydroxy-19-methyl-5,9-dioxo-8-oxa-4,15-diazahexacyclo[14.7.1.0²,¹⁴.0⁴,¹³0⁶,¹¹.0²⁰,²⁴]tetracosa-1,6(11),12,14,16,18,20(24)-heptaen-23-yl]carbamoyl}methoxy)methyl]carbamoyl}methyl)carbamate (LP26)

[chemical structure]

[0892] Following the general procedure from LP16 (6.0 mg, 4.8 μmol) and intermediate II2c (2.0 mg, 1.6 μmol), branched linker-payload LP26 (5 mg, 65% yield) was obtained as a light yellow solid after purification by prep-HPLC (10-95% acetonitrile in aq. formic acid (0.01%)). ESI m/z: 717.3 (M/4+H)⁺ (E-ring-open form, Rt=6.38 minute, 14%); 950.2 (M/3+H)⁺, 712.9 (M/4+H)⁺ (lactone form, Rt=7.10 min, 86%). ¹H NMR (400 MHz, DMSO_{d6}) δ 9.99 (s, 2H), 8.80 (t, J=6.8 Hz, 2H), 8.68-8.64 (m, 1H), 8.50 (d, J=8.8 Hz, 2H), 8.20 (t, J=6.4 Hz, 1H), 8.13 (d, J=7.6 Hz, 2H), 7.88 (d, J=8.4 Hz, 2H), 7.78 (d, J=10.8 Hz, 2H), 7.69 (d, J=7.6 Hz, 1H), 7.61-7.57 (m, 5H), 7.50-7.41 (m, 5H), 7.37-7.26 (m, 9H), 6.53 (s, 2H), 5.98 (t, J=5.6 Hz, 2H), 5.62-5.57 (m, 2H), 5.45-5.36 (m, 8H), 5.19 (s, 4H), 5.01 (d, J=14.4 Hz, 1H), 4.92 (s, 4H), 4.63 (d, J=6.0 Hz, 4H), 4.41-4.35 (m, 2H), 4.23 (t, J=8.0 Hz, 2H), 4.02 (s, 4H), 3.95-3.81 (m, 3H), 3.62-3.56 (m, 8H), 3.47-3.44 (m, 24H), 3.22-3.17 (m, 6H), 3.05-2.98 (m, 2H), 2.93-2.88 (m, 2H), 2.64-2.58 (m, 2H), 2.39-2.35 (m, 8H), 2.22-2.11 (m, 6H), 2.00-1.82 (m, 9H), 1.79-1.53 (m, 9H), 1.49-1.31 (m, 6H), 0.86-0.81 (m, 18H) ppm. ¹⁹F NMR (376 MHz, DMSO_{d6}) δ −111 ppm.

### Example 7I: (9H-Fluoren-9-yl)methyl N-[1-({2-[2-(2-{[(1 S)-1-{[(1 S)-4-(carbamoylamino)-1-{[4-({[({[({[(10S,23S)-10-ethyl-18-fluoro-10-hydroxy-19-methyl-5,9-dioxo-8-oxa-4,15-diazahexacyclo [14.7.1.0²,¹⁴.0⁴,¹³0⁶,¹¹.0²⁰,²⁴] tetracosa-1, 6(11),12,14,16,18,20(24)-heptaen-23-yl]carbamoyl}methoxy)methyl]carbamoyl}methyl) carbamoyl]oxy}methyl)phenyl]carbamoyl}butyl]carbamoyl}-2-methylpropyl]carbamoyl}ethoxy)ethoxy]ethyl} carbamoyl)-2-[({2-[2-(2-{[(1 S)-1-{[(1S)-4-(carbamoylamino)-1-{[4-({[({[({[(10S,23S)-10-ethyl-18-fluoro-10-hydroxy-19-methyl-5,9-dioxo-8-oxa-4,15-diazahexacyclo[14.7.1.0²,¹⁴.0⁴,¹³0⁶,¹¹.0²⁰,²⁴]tetracosa-1,6(11),12,14,16,18,20(24)-heptaen-23-yl]carbamoyl}methoxy)methyl]carbamoyl}methyl)carbamoyl]oxy}methyl)phenyl]carbamoyl}butyl]carbamoyl}-2-methylpropyl]carbamoyl}ethoxy)ethoxy]ethyl}carbamoyl)methyl]-5,8,11-trioxa-2-azatridecan-13-yl]carbamate (LP27f)

[0894] Following the general procedure from LP13 (67 mg, 58 μmol) and intermediate II3f (16 mg, 19 μmol), compound LP27f (21 mg, 39% yield) was obtained as a white solid after purification by reversed phase flash chromatography (0-100% acetonitrile in aq. TFA (0.05%)). ESI m/z: 1392.2 (M/2+H)⁺.

### Example 7J: {4-[(2S)-2-[(2S)-2-{3-[2-(2-{1-Amino-12-[({2-[2-(2-{[(1 S)-1-{[(1 S)-4-(carbamoylamino)-1-{[4-({[({[({[(10S,23S)-10-ethyl-18-fluoro-10-hydroxy-19-methyl-5,9-dioxo-8-oxa-4,15-diazahexacyclo [14.7.1.0²,¹⁴.0⁴,¹³0⁶,¹¹.0²⁰,²⁴]tetracosa-1,6(11),12,14,16,18,20(24)-heptaen-23-yl]carbamoyl}methoxy)methyl] carbamoyl}methyl)carbamoyl]oxy}methyl)phenyl]carbamoyl}butyl]carbamoyl}-2-methyl propyl]carbamoyl} ethoxy)ethoxy]ethyl}carbamoyl)methyl]-3,6,9-trioxa-12-azatetradecan-14-amido}ethoxy)ethoxy]propanamido}-3-methylbutanamido]-5-(carbamoylamino)pentanamido]phenyl}methyl N-({[({[(10S,23S)-10-ethyl-18-fluoro-10-hydroxy-19-methyl-5,9-dioxo-8-oxa-4,15-diazahexacyclo[14.7.1.0²,¹⁴.0⁴,¹³0⁶,¹¹.0²⁰,²⁴] tetracosa-1,6(11),12,14,16,18,20(24)-heptaen-23-yl]carbamoyl}methoxy)methyl]carbamoyl}methyl)carbamate (LP27)

[0896] To a solution of compound LP27f (21 mg, 7.5 μmol) in DMF (5 mL) was added diethylamine (3 mg, 38 μmol), and the mixture was stirred at room temperature for 2 hours until Fmoc was totally removed according to LCMS. The resulting mixture was separated by reversed phase flash chromatography (0-100% acetonitrile in aq. TFA (0.01%)) to give LP27 (12 mg, 60% yield) as a white solid. ESI m/z: 1280.9 (M/2+H)⁺, 854.3 (M/3+H)⁺.¹H NMR (400 MHz, DMSO_{d6}) δ 10.02 (s, 1H), 8.84-8.77 (m, 2H), 8.51 (d, J=9.0 Hz, 2H), 8.24-8.14 (m, 3H), 8.10-8.04 (m, 2H), 7.91 (d, J=9.0 Hz, 2H), 7.78 (d, J=11.1 Hz, 2H), 7.63-7.55 (m, 3H), 7.46-7.40 (m, 2H), 7.32-7.24 (m, 4H), 6.53 (s, 2H), 6.05-5.99 (m, 2H), 5.65-5.55 (m, 3H), 5.43 (dd, J=11.8, 1.3 Hz, 6H), 5.19 (s, 3H), 4.92 (s, 3H), 4.70-4.55 (m, 3H), 4.40-4.35 (m, 2H), 4.26-4.20 (m, 2H), 4.01 (s, 3H), 3.70-3.37 (m, 42H), 3.25-3.21 (m, 5H), 3.16 (s, 6H), 3.05-2.98 (m, 3H), 2.97-2.89 (m, 4H), 2.69-2.62 (m, 3H), 2.42-2.30 (m, 9H), 2.22-2.11 (m, 5H), 2.00-1.92 (m, 3H), 1.88-1.79 (m, 4H), 1.74-1.65 (m, 3H), 1.63-1.54 (m, 3H), 1.49-1.27 (m, 7H), 0.91-0.78 (m, 11H) ppm. (protons of TFA were not revealed)

### Example 7K: (4R)-4-{[(1 S)-1-{[(1 S)-4-(Carbamoylamino)-1-{[4-({[({[({[(10S,23S)-10-ethyl-18-fluoro-10-hydroxy-19-methyl-5,9-dioxo-8-oxa-4,15-diazahexacyclo[14.7.1.0²,¹⁴.0⁴,¹³0⁶,¹¹.0²⁰,²⁴]tetracosa-1,6(11),12,14,16,18,20(24)-heptaen-23-yl]carbamoyl}methoxy)methyl]carbamoyl}methyl)carbamoyl] oxy}methyl)phenyl] carbamoyl}butyl]carbamoyl}-2-methylpropyl]carbamoyl}-4-{3-[2-(2-{12-[({2-[2-(2-{[(1R)-1-{[(1S)-1-{[(1 S)-4-(carbamoylamino)-1-{[4-({[({[({[(10S,23S)-10-ethyl-18-fluoro-10-hydroxy-19-methyl-5,9-dioxo-8-oxa-4,15-diazahexacyclo[14.7.1.0²,¹⁴.0⁴,¹³0⁶,¹¹.0²⁰,²⁴]tetracosa-1,6(11),12,14,16,18,20(24)-heptaen-23-yl]carbamoyl}methoxy)methyl]carbamoyl}methyl)carbamoyl]oxy}methyl)phenyl]carbamoyl}butyl]carbamoyl}-2-methylpropyl] carbamoyl}-3-carboxypropyl]carbamoyl}ethoxy)ethoxy]ethyl}carbamoyl)methyl]-1-[2-(cyclooct-2-yn-1-yloxy)acetamido]-3,6,9-trioxa-12-azatetradecan-14-amido}ethoxy)ethoxy]propanamido}butanoic acid (LP28)

[0898] Following the general procedure from LP14 (17 mg, 13 μmol) and intermediate II3b (4.0 mg, 5.0 μmol), branched linker-payload LP28 (TFA salt, 5 mg, 34% yield) was obtained as a white solid after purification by prep-HPLC (10-95% acetonitrile in aq. TFA (0.05%)). ESI m/z: 995.2 (M/3+H)⁺. ¹H NMR (400 MHz, DMSO_{d6}) δ 9.82 (s, 2H), 8.81 (t, J=6.4 Hz, 2H), 8.52 (d, J=8.8 Hz, 2H), 8.19-8.14 (m, 4H), 8.07 (d, J=8.4 Hz, 2H), 7.78 (d, J=10.8 Hz, 2H), 7.61 (d, J=8.4 Hz, 4H), 7.43 (t, J=5.6 Hz, 2H), 7.31 (s, 2H), 7.27 (d, J=8.4 Hz, 4H), 6.48 (br s, 2H), 6.01 (br s, 2H), 5.63-5.57 (m, 2H), 5.43-5.40 (m, 4H), 5.21-5.16 (m, 4H), 4.93 (s, 4H), 4.63 (d, J=6.4 Hz, 4H), 4.42-4.33 (m, 4H), 4.30-4.25 (m, 2H), 4.24-4.19 (m, 2H), 4.02 (s, 4H), 3.90-3.85 (m, 2H), 3.48-3.73 (m, 2H), 3.69 (br s, 4H), 3.64-3.60 (m, 8H), 3.58-3.55 (m, 6H), 3.52-3.50 (m, 8H), 3.29-3.24 (m, 8H), 3.03-3.00 (m, 2H), 2.97-2.94 (m, 2H), 2.40-2.37 (m, 8H), 2.26-2.15 (m, 14H), 2.09-2.00 (m, 6H), 1.93-1.81 (m, 12H), 1.79-1.70 (m, 8H), 1.66-1.55 (m, 6H), 1.49-1.34 (m, 8H), 0.90-0.81 (m, 20H) ppm. (The protons of COOH and TFA were not revealed)¹⁹F NMR (376 MHz, DMSO_{d6}) δ −71.08, −111.30 ppm.

### Example 7L: (4R)-4-[3-(2-{2-[1-(4-{2-Azatricyclo[10.4.0.0⁴,⁹]hexadeca-1(12),4(9),5,7,13,15-hexaen-10-yn-2-yl}-4-oxobutanamido)-12-[({2-[2-(2-{[(1R)-1-{[(1 S)-1-{[(1 S)-4-(carbamoylamino)-1-{[4-({[({[({[(10S,23S)-10-ethyl-18-fluoro-10-hydroxy-19-methyl-5,9-dioxo-8-oxa-4,15-diazahexacyclo [14.7.1.0²,¹⁴.0⁴,¹³0⁶,¹¹.0²⁰,²⁴]tetracosa-1, 6(11),12,14,16,18,20(24)-heptaen-23-yl]carbamoyl}methoxy)methyl]carbamoyl}methyl)carbamoyl]oxy} methyl)phenyl]carbamoyl}butyl]carbamoyl}-2-methylpropyl]carbamoyl}-3-carboxypropyl]carbamoyl}ethoxy) ethoxy]ethyl}carbamoyl)methyl]-3,6,9-trioxa-12-azatetradecan-14-amido]ethoxy}ethoxy)propanamido]-4-{[(1 S)-1-{[(1 S)-4-(carbamoylamino)-1-{[4-({[({[({[(10S,23S)-10-ethyl-18-fluoro-10-hydroxy-19-methyl-5,9-dioxo-8-oxa-4,15-diazahexacyclo[14.7.1.0²,¹⁴.0⁴,¹³0⁶,¹¹.0²⁰,²⁴]tetracosa-1,6(11),12, 14,16,18,20(24)-heptaen-23-yl] carbamoyl}methoxy)methyl]carbamoyl}methyl)carbamoyl]oxy}methyl)phenyl]carbamoyl}butyl]carbamoyl}-2-methylpropyl]carbamoyl}butanoic acid (LP30)

[0900] Following the general procedure from LP14 (16 mg, 12 μmol) and intermediate II3c (4.0 mg, 4.3 μmol), branched linker-payload LP30 (5 mg, 37% yield) was obtained as a white solid after purification by prep-HPLC (10-95% acetonitrile in water). ESI m/z: 786.4 (M/4+H)⁺ (both E-ring-open form, Rt=5.65 min, 34%); 781.8 (M/4+H)⁺ (mono E-ring-open form, Rt=5.95 min, 43%); 777.3 (M/4+H)⁺, 1036.2 (M/3+H)⁺ (lactone form, Rt=6.32 min, 19%).

### Example 7M: (4S)-4-{[(1 S)-1-{[(1 S)-4-(Carbamoylamino)-1-{[4-({[({[({[(10S,23S)-10-ethyl-18-fluoro-10-hydroxy-19-methyl-5,9-dioxo-8-oxa-4,15-diazahexacyclo[14.7.1.0²,¹⁴.0⁴,¹³0⁶,¹¹.0²⁰,²⁴]tetracosa-1,6 (11),12,14,16,18,20(24)-heptaen-23-yl]carbamoyl}methoxy)methyl]carbamoyl}methyl)carbamoyl]oxy} methyl) phenyl]carbamoyl}butyl]carbamoyl}-2-methylpropyl]carbamoyl}-4-{3-[2-(2-{12-[({2-[2-(2-{[(1 S)-1-{[(1 S)-1-{[(1 S)-4-(carbamoylamino)-1-{[4-({[({[({[(10S,23S)-10-ethyl-18-fluoro-10-hydroxy-19-methyl-5,9-dioxo-8-oxa-4,15-diazahexacyclo[14.7.1.0²,¹⁴.0⁴,¹³0⁶,¹¹.0²⁰,²⁴]tetracosa-1,6(11),12,14,16,18,20(24)-heptaen-23-yl] carbamoyl}methoxy)methyl]carbamoyl}methyl)carbamoyl]oxy}methyl)phenyl]carbamoyl}butyl]carbamoyl}-2-methylpropyl]carbamoyl}-3-carboxypropyl]carbamoyl}ethoxy)ethoxy]ethyl}carbamoyl)methyl]-1-({[(9H-fluoren-9-yl)methoxy]carbonyl}amino)-3,6,9-trioxa-12-azatetradecan-14-amido}ethoxy)ethoxy]propanamido}butanoic acid (LP31f)

[0902] Following the general procedure from LP15 (28 mg, 22 μmol) and intermediate II3f (7.0 mg, 8.8 μmol), compound LP31f (20 mg, 75% yield) was obtained as a white solid after purification by prep-HPLC (10-95% acetonitrile in aq. TFA (0.05%)). ESI m/z: 761.0 (M/4+H)⁺ (lactone form).

### Example 7N: (4S)-4-{3-[2-(2-{1-Amino-12-[({2-[2-(2-{[(1 S)-1-{[(1 S)-1-{[(1 S)-4- (carbamoylamino)-1-{[4-({[({[({[(10S,23S)-10-ethyl-18-fluoro-10-hydroxy-19-methyl-5,9-dioxo-8-oxa-4,15-diazahexacyclo [14.7.1.0²,¹⁴.0⁴,¹³0⁶,¹¹.0²⁰,²⁴]tetracosa-1, 6(11),12,14,16,18,20(24)-heptaen-23-yl]carbamoyl}methoxy)methyl]carbamoyl}methyl) carbamoyl]oxy}methyl) phenyl]carbamoyl}butyl]carbamoyl}-2-methyl propyl]carbamoyl}-3-carboxypropyl]carbamoyl}ethoxy)ethoxy]ethyl}carbamoyl)methyl]-3,6,9-trioxa-12-azatetradecan-14-amido}ethoxy)ethoxy]propanamido}-4-{[(1S)-1-{[(1 S)-4-(carbamoylamino)-1-{[4-({[({[({[(10S,23S)-10-ethyl-18-fluoro-10-hydroxy-19-methyl-5,9-dioxo-8-oxa-4,15-diazahexacyclo[14.7.1.0²,¹⁴.0⁴,¹³0⁶,¹¹.0²⁰,²⁴]tetracosa-1,6(11),12, 14,16,18,20(24)-heptaen-23-yl]carbamoyl}methoxy)methyl]carbamoyl}methyl)carbamoyl]oxy}methyl)phenyl]carbamoyl}butyl]carbamoyl}-2-methylpropyl]carbamoyl}butanoic acid (LP31)

[0904] To a solution of compound LP31f (20 mg, 6.6 μmol) in DMF (2 mL) was added piperidine (6.0 mg, 66 μmol), and the reaction mixture was stirred at room temperature for an hour until Fmoc was totally removed according to LCMS. The mixture was directly purified by prep-HPLC (10-95% acetonitrile in aq. TFA (0.05%)) to give LP31 (TFA salt, 13 mg, 70% yield) as a white solid. ESI: 940.5 (M/3+H)⁺. ¹H NMR (400 MHz, DMSO_{d6}) δ 10.05 (br s, 2H), 8.80 (t, J=7.2 Hz, 2H), 8.51 (d, J=8.8 Hz, 2H), 8.19 (d, J=7.2 Hz, 2H), 8.09 (d, J=8.4 Hz, 2H), 7.80-7.75 (m, 7H), 7.58 (d, J=8.4 Hz, 4H), 7.42 (t, J=5.6 Hz, 2H), 7.31 (s, 2H), 7.27 (d, J=8.8 Hz, 4H), 7.12-6.98 (s, 1H), 6.53 (br s, 2H), 6.04-6.58 (m, 2H), 5.62-5.57 (m, 2H), 5.46-5.40 (m, 6H), 5.21-5.16 (m, 4H), 4.92 (s, 4H), 4.62 (d, J=6.4 Hz, 4H), 4.40-4.32 (m, 4H), 4.19 (d, J=7.6 Hz, 2H), 4.01 (s, 4H), 3.63-3.55 (m, 18H), 3.50-3.46 (m, 10H), 3.27-3.26 (m, 2H), 3.02-2.92 (m, 8H), 2.45-2.31 (m, 16H), 2.26-2.15 (m, 10H), 2.00-1.95 (m, 2H), 1.91-1.80 (m, 8H), 1.73-1.66 (m, 4H), 1.61-1.56 (m, 2H), 1.46-1.31 (m, 6H), 0.89-0.80 (m, 22H) ppm. (Protons of COOH and TFA were not revealed.) ¹⁹F NMR (376 MHz, DMSO_{d6}) δ −73.74, −111.29 ppm.

### Example 70: (4S)-4-{[(1 S)-1-{[(1 S)-4-(Carbamoylamino)-1-{[4-({[({[({[(10S,23S)-10-ethyl-18-fluoro-10-hydroxy-19-methyl-5,9-dioxo-8-oxa-4,15-diazahexacyclo[14.7.1.0²,¹⁴.0⁴,¹³0⁶,¹¹.0²⁰,²⁴]tetracosa-1,6 (11),12,14,16,18,20(24)-heptaen-23-yl]carbamoyl}methoxy)methyl]carbamoyl}methyl)carbamoyl]oxy}methyl) phenyl]carbamoyl}butyl]carbamoyl}-2-methylpropyl]carbamoyl}-4-{3-[2-(2-{12-[({2-[2-(2-{[(1 S)-1-{[(1 S)-1-{[(1 S)-4-(carbamoylamino)-1-{[4-({[({[({[(10S,23S)-10-ethyl-18-fluoro-10-hydroxy-19-methyl-5,9-dioxo-8-oxa-4,15-diazahexacyclo[14.7.1.0²,¹⁴.0⁴,¹³0⁶,¹¹.0²⁰,²⁴]tetracosa-1,6(11),12,14,16,18,20(24)-heptaen-23-yl]carbamoyl}methoxy)methyl]carbamoyl}methyl)carbamoyl]oxy}methyl)phenyl]carbamoyl}butyl]carbamoyl}-2-methyl propyl]carbamoyl}-3-carboxypropyl]carbamoyl}ethoxy)ethoxy]ethyl}carbamoyl)methyl]-1-[2-(cyclooct-2-yn-1-yloxy)acetamido]-3,6,9-trioxa-12-azatetradecan-14-amido}ethoxy)ethoxy]propanamido}butanoic acid (LP32)

[0906] Following the general procedure starting from II3b (5.0 mg, 6.9 μmol) and LP15 (22 mg, 17 μmol), linker-payload LP32 (12 mg, 62% yield) was obtained as a white solid after purification by prep-HPLC (10-95% acetonitrile in aq. formic acid (0.05%)). ESI m/z: 995.5 (M/3+H)⁺. ¹H NMR (400 MHz, DMSO_{d6}) δ 10.04 (br s, 2H), 8.80 (t, J=6.4 Hz, 2H), 8.51 (d, J=9.2 Hz, 2H), 8.19 (d, J=7.2 Hz, 2H), 8.09 (d, J=8.0 Hz, 2H), 8.02 (t, J=6.0 Hz, 2H), 7.80-7.75 (m, 4H), 7.58 (d, J=8.4 Hz, 4H), 7.43 (d, J=6.0 Hz, 2H), 7.31 (s, 2H), 7.27 (d, J=8.0 Hz, 4H), 6.53 (s, 2H), 6.01 (br s, 2H), 5.62-5.57 (m, 2H), 5.46-5.40 (m, 8H), 5.19 (s, 4H), 4.92 (s, 4H), 4.62 (d, J=6.4 Hz, 4H), 4.40-4.32 (m, 4H), 4.29-4.25 (s, 1H), 4.19 (d, J=7.2 Hz, 2H), 4.01 (s, 4H), 3.89-3.84 (m, 1H), 3.78-3.73 (m, 1H), 3.63-3.57 (m, 8H), 3.51-3.45 (s, 22H), 3.27-3.22 (m, 10H), 3.16 (s, 4H), 3.05-3.00 (m, 3H), 2.96-2.92 (m, 2H), 2.68-2.64 (m, 2H), 2.38 (s, 8H), 2.24-2.15 (m, 10H), 1.97-1.90 (m, 4H), 1.86-1.81 (m, 6H), 1.72-1.67 (m, 4H), 1.61-1.55 (m, 4H), 1.45-1.35 (m, 6H), 1.25-1.21 (m, 2H), 0.89-0.81 (m, 22H) ppm. (protons of COOH were not revealed)¹⁹F NMR (376 MHz, DMSO_{d6}) δ −111.29 ppm.

### Example 7P: (4S)-4-[3-(2-{2-[1-(4-{2-Azatricyclo[10.4.0.0⁴,⁹]hexadeca-1(12),4(9),5,7,13,15-hexaen-10-yn-2-yl}-4-oxobutanamido)-12-[({2-[2-(2-{[(1 S)-1-{[(1 S)-1-{[(1 S)-4-(carbamoylamino)-1-{[4-({[({[({[(10S,23S)-10-ethyl-18-fluoro-10-hydroxy-19-methyl-5,9-dioxo-8-oxa-4,15-diazahexacyclo [14.7.1.0²,¹⁴.0⁴,¹³0⁶,¹¹.0²⁰,²⁴]tetracosa-1, 6(11),12,14,16,18,20(24)-heptaen-23-yl]carbamoyl}methoxy)methyl]carbamoyl}methyl) carbamoyl]oxy}methyl) phenyl]carbamoyl}butyl]carbamoyl}-2-methyl propyl]carbamoyl}-3-carboxypropyl]carbamoyl}ethoxy)ethoxy]ethyl}carbamoyl)methyl]-3,6,9-trioxa-12-azatetradecan-14-amido]ethoxy}ethoxy)propanamido]-4-{[(1 S)-1-{[(1 S)-4-(carbamoylamino)-1-{[4-({[({[({[(10S,23S)-10-ethyl-18-fluoro-10-hydroxy-19-methyl-5,9-dioxo-8-oxa-4,15-diazahexacyclo[14.7.1.0²,¹⁴.0⁴,¹³0⁶,¹¹.0²⁰,²⁴]tetracosa-1,6(11), 12,14,16,18,20(24)-heptaen-23-yl]carbamoyl}methoxy)methyl]carbamoyl}methyl)carbamoyl]oxy}methyl)phenyl]carbamoyl}butyl]carbamoyl}-2-methylpropyl]carbamoyl}butanoic acid (LP34)

[0908] Following the general procedure starting from II3c (2.8 mg, 3 μmol) and LP15 (12 mg, 9 μmol), linker-payload LP34 (4 mg, 43% yield) was obtained as a white solid after purification by prep-HPLC (10-95% acetonitrile in aq. formic acid (0.05%)) and LP15 (3 mg) was recovered. ESI m/z: 629.3 (M/5+H)⁺, 786.5 (M/4+H)⁺ (both E-ring-open form, Rt=5.70 min, 4%); 1042.2 (M/3+H)⁺, 781.8 (M/4+H)⁺ (mono E-ring-open form, Rt=5.98 min, 28%); 1036.1 (M/3+H)⁺, 777.4 (M/4+H)⁺ (Rt=6.33 min, 65%). ¹H NMR (400 MHz, DMSO_{d6}) δ 10.04 (s, 2H), 8.80 (t, J=6.4 Hz, 2H), 8.50 (d, J=8.0 Hz, 2H), 8.18 (d, J=9.6 Hz, 2H), 8.08 (d, J=8.0 Hz, 2H), 8.00 (d, J=5.6 Hz, 2H), 7.80-7.74 (m, 4H), 7.67 (d, J=8.4 Hz, 1H), 7.62-7.57 (m, 4H), 7.50-7.41 (m, 6H), 7.37-7.26 (m, 10H), 6.53 (s, 2H), 5.98 (t, J=5.6 Hz, 2H), 5.64-5.57 (m, 2H), 5.44-5.41 (m, 7H), 5.20 (s, 4H), 5.02 (d, J=14.4 Hz, 1H), 4.92 (s, 4H), 4.63 (d, J=6.0 Hz, 4H), 4.41-4.32 (m, 4H), 4.21-4.17 (m, 2H), 4.02 (s, 4H), 3.62-3.58 (m, 8H), 3.58-3.46 (m, 16H), 3.26-3.22 (m, 6H), 3.19-3.15 (m, 4H), 3.11-3.00 (m, 4H), 2.96-2.91 (m, 2H), 2.67-2.61 (m, 2H), 2.41-2.38 (m, 11H), 2.25-2.13 (m, 13H), 2.03-1.93 (m, 4H), 1.88-1.78 (m, 8H), 1.74-1.53 (m, 10H), 1.48-1.32 (m, 6H), 0.88-0.81 (in, 18H) ppm. (Protons of COOH were not revealed.)

### Example 7Q: (4R)-4-{[(1 S)-1-{[(1 S)-4-(Carbamoylamino)-1-{[4-({[({[({[(10S,23S)-10-ethyl-18-fluoro-10-hydroxy-19-methyl-5,9-dioxo-8-oxa-4,15-diazahexacyclo[14.7.1.0²,¹⁴.0⁴,¹³0⁶,¹¹.0²⁰,²⁴]tetracosa-1,6 (11),12,14,16,18,20(24)-heptaen-23-yl]carbamoyl}methoxy)methyl]carbamoyl}methyl)carbamoyl]oxy}methyl) phenyl]carbamoyl}butyl]carbamoyl}-2-methylpropyl]carbamoyl}-4-(3-{2-[2-(3-{3-[2-({2-[2-(2-{[(1R)-1-{[(1 S)-1-{[(1S)-4-(carbamoylamino)-1-{[4-({[({[({[(10S,23S)-10-ethyl-18-fluoro-10-hydroxy-19-methyl-5,9-dioxo-8-oxa-4,15-diazahexacyclo[14.7.1.0²,¹⁴.0⁴,¹³0⁶,¹¹.0²⁰,²⁴]tetracosa-1,6(11),12,14,16,18,20(24)-heptaen-23-yl]carbamoyl}methoxy)methyl]carbamoyl}methyl)carbamoyl]oxy}methyl)phenyl]carbamoyl}butyl]carbamoyl}-2-methyl propyl]carbamoyl}-3-carboxypropyl]carbamoyl}ethoxy)ethoxy]ethyl}carbamoyl)ethoxy]-2-[2-(cyclooct-2-yn-1-yloxy)acetamido]propoxy}propanamido)ethoxy]ethoxy}propanamido)butanoic acid (LP36)

[0910] Following the general procedure starting from II4b (3.0 mg, 4.1 μmol) and LP14 (13 mg, 10 μmol), linker-payload LP36 (TFA salt, 5 mg, 38% yield) was obtained as a white solid after purification by prep-HPLC (10-95% acetonitrile in aq. TFA (0.05%)). ESI m/z: 970.8 (M/3+H)⁺. ¹H NMR (400 MHz, DMSO_{d6}) δ 12.07 (br s, 2H), 9.80 (s, 2H), 8.81 (t, J=6.4 Hz, 2H), 8.51 (d, J=8.8 Hz, 2H), 8.16 (t, J=6.8 Hz, 4H), 8.08 (d, J=7.6 Hz, 2H), 7.93 (d, J=5.2 Hz, 2H), 7.78 (d, J=10.8 Hz, 2H), 7.63-7.59 (m, 4H), 7.44 (t, J=5.6 Hz, 2H), 7.36 (d, J=8.4 Hz, 1H), 7.30 (s, 2H), 7.27 (d, J=8.4 Hz, 4H), 6.54 (s, 2H), 6.00 (t, J=5.6 Hz, 2H), 5.63-5.57 (m, 2H), 5.46-5.40 (m, 8H), 5.19 (m, 4H), 4.92 (s, 4H), 4.63 (d, J=6.4 Hz, 4H), 4.41-4.32 (m, 4H), 4.29-4.25 (m, 1H), 4.23-4.19 (m, 2H), 4.01 (s, 4H), 3.90-3.85 (m, 1H), 3.79-3.74 (m, 1H), 3.63-3.60 (m, 4H), 3.59-3.55 (m, 6H), 3.52-3.49 (m, 2H), 3.46-3.42 (m, 8H), 3.21-3.16 (m, 6H), 3.05-2.89 (m, 6H), 2.40-2.36 (m, 8H), 2.33-2.28 (m, 6H), 2.26-2.13 (m, 12H), 2.09-2.01 (m, 4H), 1.92-1.80 (m, 8H), 1.79-1.70 (m, 6H), 1.64-1.55 (m, 4H), 1.46-1.34 (m, 6H), 0.89-0.81 (m, 23H) ppm. (protons of TFA were not revealed)¹⁹F NMR (376 MHz, DMSO_{d6}) δ −75, −111 ppm.

### Example 7R: (4S)-4-{[(1 S)-1-{[(1 S)-4-(Carbamoylamino)-1-{[4-({[({[({[(10S,23S)-10-ethyl-18-fluoro-10-hydroxy-19-methyl-5,9-dioxo-8-oxa-4,15-diazahexacyclo[14.7.1.0²,¹⁴.0⁴,¹³0⁶,¹¹.0²⁰,²⁴]tetracosa-1,6 (11),12,14,16,18,20(24)-heptaen-23-yl]carbamoyl}methoxy)methyl]carbamoyl}methyl)carbamoyl]oxy}methyl) phenyl]carbamoyl}butyl]carbamoyl}-2-methylpropyl]carbamoyl}-4-(3-{2-[2-(3-{3-[2-({2-[2-(2-{[(1S)-1-{[(1S)-1-{[(1S)-4-(carbamoylamino)-1-{[4-({[({[({[(10S,23S)-10-ethyl-18-fluoro-10-hydroxy-19-methyl-5,9-dioxo-8-oxa-4,15-diazahexacyclo[14.7.1.0²,¹⁴.0⁴,¹³0⁶,¹¹.0²⁰,²⁴]tetracosa-1,6(11),12,14,16,18,20(24)-heptaen-23-yl]carbamoyl}methoxy)methyl]carbamoyl}methyl)carbamoyl]oxy}methyl)phenyl]carbamoyl}butyl]carbamoyl}-2-methyl propyl]carbamoyl}-3-carboxypropyl]carbamoyl}ethoxy)eth oxy]ethyl}carbamoyl)ethoxy]-2-[2-(cyclooct-2-yn-1-yloxy)acetamido]propoxy}propanamido)ethoxy]ethoxy}propanamido)butanoic acid (LP37)

[0912] Following the general procedure starting from II4b (3.0 mg, 4.1 μmol) and LP15 (13 mg, 10 μmol), linker-payload LP37 (TFA salt, 4 mg, 31% yield) was obtained as a white solid after purification by prep-HPLC (10-95% acetonitrile in aq. TFA (0.05%)). ESI m/z: 970.6 (M/3+H)⁺.

### Example 7S: (4S)-4-{[(1 S)-1-{[(1 S)-4-(Carbamoylamino)-1-{[4-({[({[({[(10S,23S)-10-ethyl-18-fluoro-10-hydroxy-19-methyl-5,9-dioxo-8-oxa-4,15-diazahexacyclo[14.7.1.0²,¹⁴.0⁴,¹³0⁶,¹¹.0²⁰,²⁴]tetracosa-1,6 (11),12,14,16,18,20(24)-heptaen-23-yl]carbamoyl}methoxy)methyl]carbamoyl}methyl)carbamoyl]oxy}methyl) phenyl]carbamoyl}butyl]carbamoyl}-2-methylpropyl]carbamoyl}-4-(3-{2-[2-(3-{3-[2-({2-[2-(2-{[(1S)-1-{[(1S)-1-{[(1S)-4-(carbamoylamino)-1-{[4-({[({[({[(10S,23S)-10-ethyl-18-fluoro-10-hydroxy-19-methyl-5,9-dioxo-8-oxa-4,15-diazahexacyclo[14.7.1.0²,¹⁴.0⁴,¹³0⁶,¹¹.0²⁰,²⁴]tetracosa-1,6(11),12,14,16,18,20(24)-heptaen-23-yl]carbamoyl}methoxy)methyl]carbamoyl}methyl)carbamoyl]oxy}methyl)phenyl]carbamoyl}butyl]carbamoyl}-2-methyl propyl]carbamoyl}-3-carboxypropyl]carbamoyl}ethoxy)eth oxy]ethyl}carbamoyl)ethoxy]-2-[3-(2-{2-[2-(cyclooct-2-yn-1-yloxy)acetamido]ethoxy}ethoxy)propanamido]propoxy}propanamido)ethoxy]ethoxy}propanamido)butanoic acid (LP38)

[0914] Following the general procedure starting from II4Ab (6.0 mg, 6.9 μmol) and LP15 (22 mg, 17 μmol), linker-payload LP38 (6.5 mg, 31% yield) was obtained as a white solid after purification by prep-HPLC (10-95% acetonitrile in aq. formic acid (0.05%)). ESI m/z: 1024.3 (M/3+H)⁺. ¹H NMR (400 MHz, DMSO_{d6}) δ 10.04 (s, 2H), 8.80 (t, J=6.4 Hz, 2H), 8.51 (d, J=8.4 Hz, 2H), 8.19 (d, J=6.0 Hz, 2H), 8.09 (d, J=7.6 Hz, 2H), 7.93 (t, J=4.8 Hz, 2H), 7.79 (s, 1H), 7.78-7.73 (m, 4H), 7.64-7.61 (m, 1H), 7.58 (d, J=8.4 Hz, 4H), 7.43 (d, J=5.6 Hz, 2H), 7.31 (s, 2H), 7.27 (d, J=8.4 Hz, 4H), 6.53 (s, 2H), 6.01 (br s, 2H), 5.62-5.57 (m, 2H), 5.46-5.40 (m, 8H), 5.19 (s, 4H), 4.92 (s, 4H), 4.62 (d, J=6.4 Hz, 4H), 4.40-4.32 (m, 4H), 4.29-4.25 (m, 1H), 4.19 (d, J=7.6 Hz, 2H), 4.01 (s, 4H), 3.89-3.84 (m, 1H), 3.78-3.73 (m, 1H), 3.63-3.55 (m, 17H), 3.47 (s, 12H), 3.27-3.23 (m, 4H), 3.21-3.17 (m, 6H), 3.04-3.00 (m, 2H), 2.96-2.92 (m, 2H), 2.38 (s, 8H), 2.36-2.29 (m, 10H), 2.25-2.14 (m, 12H), 1.99-1.94 (m, 2H), 1.90-1.81 (m, 8H), 1.76-1.67 (m, 6H), 1.61-1.55 (m, 4H), 1.46-1.35 (m, 6H), 0.89-0.81 (m, 22H) ppm. (protons of COOH were not revealed)¹⁹F NMR (376 MHz, DMSO_{d6}) δ −111 ppm.

### Example 7T: (4S)-4-{[(1 S)-1-{[(1 S)-4-(Carbamoylamino)-1-{[4-({[({[({[(10S,23S)-10-ethyl-18-fluoro-10-hydroxy-19-methyl-5,9-dioxo-8-oxa-4,15-diazahexacyclo[14.7.1.0²,¹⁴.0⁴,¹³0⁶,¹¹.0²⁰,²⁴]tetracosa-1,6 (11),12,14,16,18,20(24)-heptaen-23-yl]carbamoyl}methoxy)methyl]carbamoyl}methyl)carbamoyl]oxy}methyl) phenyl]carbamoyl}butyl]carbamoyl}-2-methylpropyl]carbamoyl}-4-(3-{2-[2-(3-{3-[2-({2-[2-(2-{[(1S)-1-{[(1S)-1-{[(1S)-4-(carbamoylamino)-1-{[4-({[({[({[(10S,23S)-10-ethyl-18-fluoro-10-hydroxy-19-methyl-5,9-dioxo-8-oxa-4,15-diazahexacyclo[14.7.1.0²,¹⁴.0⁴,¹³0⁶,¹¹.0²⁰,²⁴]tetracosa-1,6(11),12,14,16,18,20(24)-heptaen-23-yl]carbamoyl}methoxy)methyl]carbamoyl}methyl)carbamoyl]oxy}methyl)phenyl]carbamoyl}butyl]carbamoyl}-2-methyl propyl]carbamoyl}-3-carboxypropyl]carbamoyl}ethoxy)eth oxy]ethyl}carbamoyl)ethoxy]-2-{[2-({2-[2-(2-{[(1S)-1-{[(1 S)-1-{[(1S)-4-(carbamoylamino)-1-{[4-({[({[({[(10S,23S)-10-ethyl-18-fluoro-10-hydroxy-19-methyl-5,9-dioxo-8-oxa-4,15-diazahexacyclo[14.7.1.0²,¹⁴.0⁴,¹³0⁶,¹¹.0²⁰,²⁴]tetracosa-1,6(11),12,14,16,18,20(24)-heptaen-23-yl]carbamoyl}methoxy)methyl]carbamoyl}methyl)carbamoyl]oxy}methyl)phenyl]carbamoyl}butyl]carbamoyl}-2-methylpropyl]carbamoyl}-3-carboxypropyl]carbamoyl}ethoxy)ethoxy]ethyl}carbamoyl) ethoxy]methyl}-2-[3-(2-{2-[2-(cyclooct-2-yn-1-yloxy)acetamido]ethoxy}ethoxy)propanamido]propoxy}propanamido)ethoxy]ethoxy}propanamido)butanoic acid (LP41)

[0916] Following the general procedure starting from II5Ab (5.0 mg, 4.8 μmol) and LP15 (24 mg, 19 μmol, 4 equiv.), linker-payload LP41 (7.1 mg, 33% yield) was obtained as a white solid after purification by prep-HPLC (10-95% acetonitrile in aq. formic acid (0.1%)). ESI m/z: 1107.6 (M/4+H)⁺. ¹H NMR (400 MHz, DMSO_{d6}) δ 10.04 (br s, 3H), 8.80 (t, J=6.8 Hz, 3H), 8.50 (d, J=8.8 Hz, 3H), 8.20 (d, J=6.4 Hz, 3H), 8.09 (d, J=7.6 Hz, 3H), 7.94-7.90 (m, 3H), 7.77 (d, J=10.8 Hz, 6H), 7.58 (d, J=8.4 Hz, 6H), 7.42 (d, J=6.4 Hz, 3H), 7.30 (s, 3H), 7.27 (d, J=8.4 Hz, 6H), 6.52 (s, 3H), 6.01 (br s, 3H), 5.62-5.57 (m, 3H), 5.46-5.40 (m, 13H), 5.20-5.16 (m, 6H), 4.92 (s, 6H), 4.62 (d, J=6.0 Hz, 6H), 4.40-4.32 (m, 6H), 4.19 (t, J=7.6 Hz, 3H), 4.01 (s, 6H), 3.89-3.84 (m, 1H), 3.78-3.73 (m, 1H), 3.64-3.51 (m, 30H), 3.47 (s, 15H), 3.40-3.36 (m, 9H), 3.26-3.24 (m, 3H), 3.21-3.17 (m, 9H), 3.03-3.00 (m, 3H), 2.96-2.91 (m, 3H), 2.43-2.41 (m, 3H), 2.38 (s, 9H), 2.36-2.28 (m, 15H), 2.25-2.20 (m, 9H), 2.18-2.14 (m, 6H), 1.98-1.94 (m, 3H), 1.87-1.81 (m, 9H), 1.74-1.70 (m, 3H), 1.60-1.56 (m, 3H), 1.43-1.35 (m, 6H), 0.88-0.79 (m, 33H) ppm. (protons of COOH were not revealed)¹⁹F NMR (376 MHz, DMSO_{d6}) δ −111 ppm.

[chemical structure]

### Example 7U: Methyl (4S)-4-{[(1S)-1-{[(1S)-4-(Carbamoylamino)-1-{[4-(hydroxymethyl) phenyl]carbamoyl}butyl]carbamoyl}-2-methyl propyl]carbamoyl}-4-{3-[3-(2-{[(1 S)-1-{[(1 S)-1-{[(1 S)-4-(carbamoylamino)-1-{[4-(hydroxymethyl) phenyl]carbamoyl}butyl] carbamoyl}-2-methylpropyl]carbamoyl}-4-methoxy-4-oxobutyl]carbamoyl}ethoxy)-2-[3-(2-{2-[2-(cyclooct-2-yn-1-yloxy)acetamido]ethoxy}ethoxy)propanamido]propoxy]propanamido}butanoate (LP39-1)

[0918] To a solution of compound II4Ab (0.13 g, 0.15 mmol) in DMF (3 mL) were added DIPEA (58 mg, 0.45 mmol) and ^{L}EvcPAB (78 mg, 0.15 mmol), and the reaction mixture was stirred at room temperature for 3 hours, which was monitored by LCMS. The resulting mixture was purified by reversed phase flash chromatography (0-65% acetonitrile in aq. TFA (0.01%)) to give compound LP39-1 as a white solid. ESI m/z: 784.5 (M/2+H)⁺.

### Example 7V: Methyl (4S)-4-{[(1 S)-1-{[(1 S)-4-(carbamoylamino)-1-{[4-({[(4-nitrophenoxy) carbonyl]oxy}methyl) phenyl]carbamoyl}butyl] carbamoyl}-2-methyl propyl]carbamoyl}-4-{3-[3-(2-{[(1 S)-1-{[(1 S)-1-{[(1 S)-4-(carbamoylamino)-1-{[4-({[(4-nitro phenoxy)carbonyl]oxy}methyl) phenyl]carbamoyl}butyl] carbamoyl}-2-methyl propyl]carbamoyl}-4-methoxy-4-oxobutyl]carbamoyl}ethoxy)-2-[3-(2-{2-[2-(cyclooct-2-yn-1-yl oxy) acetamido]ethoxy}ethoxy)propanamido]propoxy]propanamido}butanoate (LP39-2)

[0920] To a solution of compound LP39-1 (0.15 g, 92 μmol) in DMF (5 mL) were added DMAP (11 mg, 92 μmol), DIPEA (36 mg, 0.28 mmol) and bis(4-nitrophenyl) carbonate (85 mg, 0.28 mmol), and the reaction mixture was stirred at room temperature for 3 hours, which was monitored by LCMS. The resulting mixture was directly separated by reversed phase flash chromatography (0-65% acetonitrile in water) to give compound LP39-2 (0.10 g, 57% yield) as a white solid. ESI m/z: 950.0 (M/2+H)⁺.

### Example 7W: Methyl (4S)-4-{[(1S)-1-{[(1 S)-4-(carbamoylamino)-1-{[4-({[({[({[(10S,23S)-10-ethyl-18-fluoro-10-hydroxy-19-methyl-5,9-dioxo-8-oxa-4,15-diazahexacyclo[14.7.1.0²,¹⁴.0⁴,¹³0⁶,¹¹.0²⁰,²⁴]tetracosa-1,6 (11),12,14,16,18,20(24)-heptaen-23-yl]carbamoyl}methoxy)methyl]carbamoyl}methyl)carbamoyl]oxy}methyl) phenyl]carbamoyl}butyl]carbamoyl}-2-methylpropyl]carbamoyl}-4-{3-[3-(2-{[(1 S)-1-{[(1 S)-1-{[(1 S)-4-(carbamoylamino)-1-{[4-({[({[({[(10S,23S)-10-ethyl-18-fluoro-10-hydroxy-19-methyl-5,9-dioxo-8-oxa-4,15-diazahexacyclo[14.7.1.0²,¹⁴.0⁴,¹³0⁶,¹¹.0²⁰,²⁴]tetracosa-1,6(11),12,14,16,18,20(24)-heptaen-23-yl]carbamoyl}methoxy)methyl]carbamoyl}methyl)carbamoyl]oxy}methyl)phenyl]carbamoyl}butyl]carbamoyl}-2-methyl propyl]carbamoyl}-4-methoxy-4-oxobutyl] carbamoyl}ethoxy)-2-[3-(2-{2-[2-(cyclooct-2-yn-1-yloxo) acetamido]ethoxy}ethoxy)propanamido]propoxy]propanamido}butanoate (LP39-3)

[0922] To a solution of compound LP39-2 (65 mg, 34 μmol) in DMF (3 mL) were added DIPEA (22 mg, 0.17 mmol) and payload P3 (50 mg, 86 μmol), and the reaction mixture was stirred at room temperature for an hour, which was monitored by LCMS. The resulting mixture was purified by reversed phase flash chromatography (0-65% acetonitrile in aq. TFA (0.01%)) to give compound LP39-3 (44 mg, 85% yield) as a white solid. ESI m/z: 927.2 (M/3+H)⁺.

### Example 7X: (4S)-4-{[(1 S)-1-{[(1 S)-4-(Carbamoylamino)-1-{[4-({[({[({[(10S,23S)-10-ethyl-18-fluoro-10-hydroxy-19-methyl-5,9-dioxo-8-oxa-4,15-diazahexacyclo[14.7.1.0²,¹⁴.0⁴,¹³0⁶,¹¹.0²⁰,²⁴]tetracosa-1,6 (11),12,14,16,18,20(24)-heptaen-23-yl]carbamoyl}methoxy)methyl]carbamoyl}methyl)carbamoyl]oxy}methyl) phenyl]carbamoyl}butyl]carbamoyl}-2-methylpropyl]carbamoyl}-4-{3-[3-(2-{[(1 S)-1-{[(1 S)-1-{[(1 S)-4-(carbamoylamino)-1-{[4-({[({[({[(10S,23S)-10-ethyl-18-fluoro-10-hydroxy-19-methyl-5,9-dioxo-8-oxa-4,15-diazahexacyclo[14.7.1.0²,¹⁴.0⁴,¹³0⁶,¹¹.0²⁰,²⁴]tetracosa-1,6(11),12,14,16,18,20(24)-heptaen-23-yl]carbamoyl}methoxy)methyl]carbamoyl}methyl)carbamoyl]oxy}methyl)phenyl]carbamoyl}butyl]carbamoyl}-2-methylpropyl]carbamoyl}-3-carboxypropyl]carbamoyl}ethoxy)-2-[3-(2-{2-[2-(cyclooct-2-yn-1-yloxy) acetamido]ethoxy}ethoxy)propanamido]propoxy]propanamido}butanoic acid (LP39)

[0924] To a solution of LP39-3 (50 mg, 18 μmol) in THF (2 mL) was added aq. lithium hydroxide (0.08 M, 2 mL), and the reaction mixture was stirred at room temperature for an hour, which was monitored by LCMS. The mixture was purified by prep-HPLC (10-95% acetonitrile in aq. formic acid (0.1%)) to give LP39 (13 mg, 26% yield) as a white solid. ESI m/z: 917.7 (M/3+H)⁺. ¹H NMR (400 MHz, DMSO_{d6}) δ 10.03 (s, 2H), 8.79 (t, J=9.2 Hz, 2H), 8.50 (d, J=9.2 Hz, 2H), 8.17 (d, J=6.8 Hz, 2H), 8.07 (d, J=5.2 Hz, 2H), 7.80-7.75 (m, 4H), 7.74-7.70 (m, 1H), 7.58 (t, J=8.4 Hz, 4H), 7.45-7.40 (m, 2H), 7.30 (s, 2H), 7.27 (d, J=7.6 Hz, 4H), 6.52 (s, 2H), 6.01-6.95 (m, 2H), 5.64-5.56 (m, 2H), 5.46-5.39 (m, 8H), 5.21-5.16 (m, 4H), 4.92 (s, 4H), 4.62 (d, J=5.6 Hz, 4H), 4.40-4.32 (m, 4H), 4.30-4.25 (m, 1H), 4.22-4.16 (m, 2H), 4.01 (s, 4H), 3.90-3.84 (m, 1H), 3.78-3.72 (m, 1H), 3.64-3.55 (m, 10H), 3.47 (s, 4H), 3.43-3.39 (m, 3H), 3.26-3.23 (m, 3H), 3.17-3.12 (m, 2H), 3.05-3.00 (m, 2H), 2.96-2.91 (m, 2H), 2.38 (s, 9H), 2.35-2.30 (m, 5H), 2.26-2.15 (m, 12H), 2.00-1.95 (m, 2H), 1.89-1.80 (m, 7H), 1.73-1.66 (m, 5H), 1.62-1.52 (m, 5H), 1.47-1.31 (m, 6H), 0.90-0.79 (m, 21H) ppm. ¹⁹F NMR (376 MHz, DMSO_{d6}) δ −73.16, −111.30 ppm.

[chemical structure]

### Example 7Y: (2S)-2-[2-(2-{1-[2-(cyclooct-2-yn-1-yloxy)acetamido]-3,6,9,12-tetraoxapentadecan-15-amido}acetamido)acetamido]-3-phenylpropanoic acid (LP23-1)

[chemical structure]

[0926] Following the similar procedure as LP9-2, except substituting Id for Ib, linker LP23-1 (88 mg, 53% yield) was obtained as colorless oil after purification by reversed phase flash chromatography (0-50% acetonitrile in aq. TFA (0.01%)). ESI m/z: 691.4 (M+H)⁺.

### Example 7Z: 1-[2-(Cyclooct-2-yn-1-yloxy)acetamido]-N-{[({[(1 S)-1-[({[({[(10S,23S)-10-ethyl-18-fluoro-10-hydroxy-19-methyl-5,9-dioxo-8-oxa-4,15-diazahexacyclo [14.7.1.0²,¹⁴.0⁴,¹³0⁶,¹¹.0²⁰,²⁴]tetracosa-1,6(11),12,14,16,18,20(24)-heptaen-23-yl]carbamoyl}methoxy)methyl]carbamoyl}methyl)carbamoyl]-2-phenylethyl]carbamoyl}methyl)carbamoyl]methyl}-3,6,9,12-tetraoxapentadecan-15-amide (LP23-2)

[chemical structure]

[0928] Following the similar procedure as LP9, except substituting LP23-1 for LP9-2, linker-payload LP23-2 (47 mg, 46% yield) was obtained as a light yellow solid. ESI m/z: 494.4 (M_{Dxd}+1)⁺.

### Example 7AA: (2S)-2-(2-{2-[(2R)-6-Azido-2-({[(9H-fluoren-9-yl)methoxy]carbonyl}amino)hexanamido]acetamido}acetamido)-3-phenylpropanoic acid (LP23-4)

[chemical structure]

[0930] To a solution of compound LP23-3 (CAS: 159610-89-6, 0.39 g, 1.0 mmol) in dry DMF (5 mL) was added HATU (0.38 g, 1.0 mmol), and the solution was stirred at room temperature for 5 minutes before the addition of LP01-1 (0.30 g, 1.0 mmol) and DIPEA (0.26 g, 2.0 mmol). The reaction mixture was stirred at room temperature for 2 hours, which was monitored by LCMS. The resulting solution was then purified by reversed phase flash chromatography (0-90% acetonitrile in aq. TFA (0.01%)) to provide compound LP23-4 (0.50 g, 76% yield) as a white solid. ESI m/z: 656.3 (M+H)⁺. ¹H NMR (400 MHz, DMSO_{d6}) δ 12.77 (s, 1H), 8.18-8.12 (m, 2H), 8.00 (d, J=5.2 Hz, 1H), 7.90 (d, J=7.6 Hz, 2H), 7.73 (t, J=6.8 Hz, 2H), 7.56 (d, J=8.4 Hz, 1H), 7.44-7.40 (m, 2H), 7.35-7.31 (m, 2H), 7.29-7.19 (m, 5H), 4.47-4.40 (m, 1H), 4.34-4.20 (m, 3H), 4.04-3.98 (m, 1H), 3.77-3.64 (m, 4H), 3.31 (t, J=6.8 Hz, 2H), 3.07-3.02 (m, 1H), 2.91-2.85 (m, 1H), 1.75-1.65 (m, 1H), 1.60-1.50 (m, 3H), 21.42-1.28 (m, 2H) ppm.

### Example 7AB: (9H-Fluoren-9-yl)methyl N-[(1R)-5-azido-1-({[({[(1S)-1-[({[({[(10S,23S)-10-ethyl-18-fluoro-10-hydroxy-19-methyl-5,9-dioxo-8-oxa-4,15-diazahexacyclo [14.7.1.0²,¹⁴.0⁴,¹³0⁶,¹¹.0²⁰,²⁴]tetracosa-1,6(11),12,14,16,18,20(24)-heptaen-23-yl]carbamoyl}methoxy)methyl]carbamoyl}methyl)carbamoyl]-2-phenylethyl]carbamoyl}methyl)carbamoyl]methyl}carbamoyl)pentyl]carbamate (LP23-5)

[chemical structure]

[0932] Following the similar procedure as LP9, except substituting LP23-4 for LP9-2, compound LP23-5 (60 mg, 64% yield) was obtained as a light yellow solid. ESI m/z: not detected any mass.

### Example 7AC: 1-[2-(Cyclooct-2-yn-1-yloxy)acetamido]-N-[(1R)-1-({[({[(1S)-1-[({[({[(10S,23S)-10-ethyl-18-fluoro-10-hydroxy-19-methyl-5,9-dioxo-8-oxa-4,15-diazahexacyclo [14.7.1.0²,¹⁴.0⁴,¹³0⁶,¹¹.0²⁰,²⁴]tetracosa-1,6(11),12,14,16,18,20(24)-heptaen-23-yl]carbamoyl}methoxy)methyl]carbamoyl}methyl)carbamoyl]-2-phenylethyl]carbamoyl}methyl)carbamoyl]methyl}carbamoyl)-5-[4-({[14-({[({[(1 S)-1-[({[({[(10S,23S)-10-ethyl-18-fluoro-10-hydroxy-19-methyl-5,9-dioxo-8-oxa-4,15-diazahexacyclo[14.7.1.0²,¹⁴.0⁴,¹³0⁶,¹¹.0²⁰,²⁴]tetracosa-1, 6(11), 12,14,16,18,20(24)-heptaen-23-yl]carbamoyl}methoxy)methyl]carbamoyl}methyl)carbamoyl]-2-phenylethyl]carbamoyl}methyl)carbamoyl]methyl}carbamoyl)-3,6,9,12-tetraoxatetradecan-1-yl]carbamoyl}methoxy)-1H,4H,5H,6H,7H,8H,9H-cycloocta[d][1,2,3]triazol-1-yl]pentyl]-3,6,9,12-tetraoxapentadecan-15-amide (LP23)

[chemical structure]

[0934] A yellow solution of LP23-5 (45 mg, 38 μmol) and LP23-2 (47 mg, 38 μmol) in DMSO (3 mL) was stirred at room temperature for 48 hours, which was monitored by LCMS. The resulting mixture was directly purified by reversed phase flash chromatography (0-50% acetonitrile in aq. TFA (0.01%)) to give a light yellow solid (60 mg, ESI m/z: 494, Rt=1.88 min.), which was dissolved in DMF (1.8 mL). To the solution was added diethylamine (0.2 mL), and the reaction mixture was stirred at room temperature for half an hour until Fmoc was totally removed according to LCMS. The mixture was separated by reversed phase flash chromatography (0-50% acetonitrile in aq. TFA (0.01%)) to give a light yellow solid (30 mg, ESI m/z: 494, Rt=1.63 min.), 20 mg of which was dissolved in dry DMF (4 mL). To which were added DIPEA (2.3 mg, 18 μmol) and a solution of Id (4.7 mg, 8.9 μmol) in dry DMF (1 mL). The reaction mixture was stirred at room temperature for 6 hours, which was monitored by LCMS. The resulting mixture was directly purified by reversed phase flash chromatography (0-100% acetonitrile in aq. TFA (0.01%)) to give crude LP23 (62% purity) as a white solid, which was further purified by prep-HPLC (0-100% acetonitrile in aq. TFA (0.01%)) to give pure LP23 (2.5 mg, 3.5% yield) as a white solid. ESI m/z: 887.6 (M/3+H)⁺. ¹H NMR (400 MHz, DMSO_{d6}) δ 8.63 (t, J=6.8 Hz, 2H), 8.50 (d, J=9.2 Hz, 2H), 8.33-8.27 (m, 2H), 8.18-8.09 (m, 4H), 8.05-7.95 (m, 3H), 7.81-7.75 (m, 3H), 7.59 (t, J=6.0 Hz, 1H), 7.31 (s, 2H), 7.26-7.14 (m, 10H), 7.09 (s, 0.5H), 6.97 (s, 0.5H), 6.52 (brs, 2H), 5.62-5.57 (m, 2H), 5.41 (s, 4H), 5.19 (s, 4H), 4.75-4.72 (m, 1H), 4.64 (d, J=6.4 Hz, 4H), 4.52-4.43 (m, 2H), 4.30-4.18 (m, 4H), 4.02 (s, 4H), 3.88-3.84 (m, 1H), 3.79-3.76 (m, 3H), 3.73-3.68 (m, 9H), 3.62-3.56 (m, 4H), 3.51-3.49 (m, 12H), 3.48-3.46 (m, 14H), 3.27-3.23 (m, 4H), 3.19-3.09 (m, 3H), 3.04-2.99 (m, 2H), 2.96-2.90 (m, 1H), 2.81-2.72 (m, 4H), 2.63-2.60 (m, 2H), 2.39-2.37 (m, 8H), 2.22-2.13 (m, 5H), 2.08-1.97 (m, 3H), 1.93-1.80 (m, 9H), 1.78-1.69 (m, 6H), 1.61-1.47 (m, 6H), 1.31-1.24 (m, 6H), 1.10-1.02 (m, 1H), 0.87 (t, J=7.6 Hz, 6H) ppm. ¹⁹F NMR (400 MHz, DMSO_{d6}) −73 (TFA), −111 (Ar—F) ppm.

[chemical structure]

### Example 7AD: (2S)-2-[2-(2-{3-[2-(2-Aminoethoxy)ethoxy]propanamido}acetamido)acetamido]-N-({[({[(10S,23S)-10-ethyl-18-fluoro-10-hydroxy-19-methyl-5,9-dioxo-8-oxa-4,15-diazahexacyclo[14.7.1.0²,¹⁴.0⁴,¹³0⁶,¹¹.0²⁰,²⁴]tetracosa-1,6(11),12,14,16,18,20(24)-heptaen-23-yl]carbamoyl}methoxy)methyl]carbamoyl}methyl)-3-phenylpropanamide (LP35-2)

[chemical structure]

[0936] To a solution of LP01f (74 mg, 70 μmol) in DMF (5 mL) was added diethylamine (26 mg, 0.35 mmol). The mixture was stirred at room temperature for 2 hours until Fmoc was totally removed according to LCMS. The resulting mixture was separated by reserved phase flash chromatography (0-100% acetonitrile in aq. TFA (0.01%)) to give a white solid (58 mg, ESI m/z: 841.4 (M+H)⁺), which was dissolved in DMF (5 mL). To the solution were successively added compound LP35-1 (28 mg, 69 μmol), DIPEA (18 mg, 0.14 mmol) and HATU (40 mg, 0.10 mmol), and the reaction mixture was stirred at room temperature for 4 hours, which was monitored by LCMS. The resulting mixture was separated by prep-HPLC (0-100% acetonitrile in aq. TFA (0.05%)) to give a white solid (54 mg, ESI m/z: 729.3 (M−M_{Dxd}+H)⁺), which was dissolved in DMF (5 mL). To the solution was added diethylamine (16 mg, 0.22 mmol), and the mixture was stirred at room temperature for 2 hours until Fmoc was totally removed according to LCMS. The resulting mixture was directly purified by reversed phase flash chromatography (0-100% acetonitrile in aq. TFA (0.01%)) to give LP35-2 (40 mg, 57% yield from LP01f) as a white solid. ESI m/z: 1000.5 (M+H)⁺, 500.8 (M/2+H)⁺.

### Example 7AE: 1-[2-(Cyclooct-2-yn-1-yloxy)acetamido]-N-(2-{2-[2-({[({[(1 S)-1-[({[({[(10S,23S)-10-ethyl-18-fluoro-10-hydroxy-19-methyl-5,9-dioxo-8-oxa-4,15-diazahexacyclo [14.7.1.0²,¹⁴.0⁴,¹³0⁶,¹¹.0²⁰,²⁴]tetracosa-1,6(11),12,14,16,18,20(24)-heptaen-23-yl]carbamoyl}methoxy)methyl]carbamoyl}methyl)carbamoyl]-2-phenylethyl]carbamoyl}methyl)carbamoyl]methyl}carbamoyl)ethoxy]ethoxy}ethyl)-12-{[(2-{2-[2-({[({[(1 S)-1-[({[({[(10S,23S)-10-ethyl-18-fluoro-10-hydroxy-19-methyl-5,9-dioxo-8-oxa-4,15-diazahexacyclo[14.7.1.0²,¹⁴.0⁴,¹³0⁶,¹¹.0²⁰,²⁴]tetracosa-1,6(11),12,14,16,18,20(24)-heptaen-23-yl]carbamoyl}methoxy)methyl]carbamoyl}methyl)carbamoyl]-2-phenylethyl]carbamoyl}methyl)carbamoyl]methyl}carbamoyl)ethoxy]ethoxy}ethyl)carbamoyl]methyl}-3,6,9-trioxa-12-azatetradecan-14-amide (LP35)

[chemical structure]

[0938] Following the similar procedure as LP24 except starting from LP35-2 (40 mg, 40 μmol) and intermediate II3b (16 mg, 20 μmol), branched linker-payload LP35 (12 mg, 24% yield) was obtained as a white solid after purification by prep-HPLC (5-95% acetonitrile in aq. TFA (0.05%)). ESI m/z: 812.7 (M/3+H)⁺. ¹H NMR (400 MHz, DMSO_{d6}) δ 8.64 (t, J=6.6 Hz, 2H), 8.52 (d, J=8.7 Hz, 2H), 8.31 (t, J=5.9 Hz, 2H), 8.19-8.09 (m, 4H), 8.05-7.98 (m, 3H), 7.77 (d, J=10.9 Hz, 2H), 7.65-7.56 (m, 2H), 7.31 (s, 2H), 7.29-7.12 (m, 8H), 6.53 (s, 2H), 5.65-5.56 (m, 3H), 5.42 (s, 3H), 5.20-5.15 (m, 3H), 4.70-4.60 (m, 3H), 4.50-4.44 (m, 2H), 4.30-4.22 (m, 2H), 4.02 (s, 3H), 3.86 (d, J=14.8 Hz, 2H), 3.78-3.66 (m, 9H), 3.63-3.55 (m, 6H), 3.53-3.40 (m, 27H), 3.27-3.19 (m, 6H), 3.15 (s, 4H), 3.09-3.00 (m, 2H), 2.81-2.72 (m, 2H), 2.70-2.63 (m, 2H), 2.42-2.32 (m, 8H), 2.25-2.11 (m, 6H), 2.09-1.97 (m, 3H), 1.94-1.68 (m, 9H), 1.63-1.51 (m, 3H), 1.43-1.34 (m, 2H), 1.29-1.20 (m, 3H), 0.87 (t, J=7.3 Hz, 6H) ppm. ¹⁹F NMR (376 MHz, DMSO_{d6}) 5-111.24 ppm. (no TFA signal)

### Example 8: Quenched Linker-Payloads qLP18, qLP29, qLP33, qLP40, qLP42

### Generic Synthesis of Quenched Linker-Payload

[0939] To a solution of the linker-payload (1 equiv.) in DMF (1-5 mM) was added amino azide AL1 (1-1.5 equiv.). The reaction mixture was stirred at room temperature for 1-3 hours until the linker-payload was totally quenched, which was monitored by LCMS. Then the mixture was purified by reversed phase flash chromatography to give the quenched Linker-P as a white solid.

TABLE 13
Chemical properties of quenched linker-payloads

| | | | | | Rt |
|---|---|---|---|---|---|
| | | | | | (min) |
| | | | | | in |
| LP# | qLP# | Name | yield | ESI m/z | LCMS |
| LP1 | qLP18 | NH₂-PEG₃-TCOT-PEG₄-VCPAB-G- | 59% | 808.5 (M/2 + H)⁺, | 1.03 |
| | | NHCH₂-Dxd | | 539.2 (M/3 + H)⁺ | |
| LP28 | qLP29 | NH₂-PEG₃-TCOT-B3-[NH-PEG₂- | 37% | 801.3 (M/4 + H)⁺, | 1.41 |
| | | ^{D}EvcPAB-G-NHCH₂-Dxd]₂ | | 1067.8 (M/3 + H)⁺ | |
| LP32 | qLP33 | NH₂-PEG₃-TCOT-B3-[NH-PEG₂- | 35% | 801.0 (M/4 + H)⁺ | 1.43 |
| | | ^{L}EvcPAB-G-NHCH₂-Dxd]₂ | | | |
| LP39 | qLP40 | NH₂-PEG₃-TCOT-PEG₂-B4-[NH- | 34% | 991.2 (M/3 + H)⁺ | 1.44 |
| | | ^{L}EVCPAB-G-NHCH₂-Dxd]₂ | | | |
| LP41 | qLP42 | NH₂-PEG₃-TCOT-PEG₂-B5-[NH-PEG₂- | 38% | 929.7 (M/5 + H)⁺, | 1.47 |
| | | ^{L}EVCPAB-G-NHCH₂-Dxd]₃ | | 1161.9 (M/4 + H)⁺ | |

### Example 9: Exemplary Linkers L1-B for Transglutaminase Bioconjugation

[0940] According to one embodiment of the present disclosure, linkers L1-B may be azide amine linkers (AL), which comprise an amine group which directly attaches to the antibody, a PEG-containing base structure, and an azide functional group (B′, n=1).

[0941] Two azide amine linkers are conjugated to the Q295 residue of antibodies with a WT Fc domain that are enzymatically deglycosylated, or antibodies with an N297D mutation, resulting in an azido-functionalized antibody with two attachments and two azide functional groups available for further modification (DAR=2n). Four azide amine linkers are conjugated to the Q295 and Q297 residues of antibodies with an N297Q mutation in the Fc domain, resulting in an azido-functionalized antibody with four attachments and four azide functional groups available for further modification (DAR=4n). The basic component structures of non-limiting exemplary azide amine linkers are shown in FIG. 3B. Specific structures synthesized as examples are provided below in Table 14.

TABLE 14
Amino-azido linkers synthesized as examples

| | | LC-MS | | |
|---|---|---|---|---|
| | | m/z | | |
| Cpd# | Structure | (100%) | MF | FW |
| AL1 | [chemical structure] | 219.2 [M + H]⁺ | C₈H₁₈N₄O₃ | 218.25 |
| AL2 | [chemical structure] | 263.2 [M + H]⁺ | C₁₀H₂₂N₄O₄.2C F₃COOH | 490.35 |
| AL3 | [chemical structure] | 351.3 [M + H]⁺ | C₁₄H₃₀N₄O₆ | 350.41 |
| AL4 | [chemical structure] | 439.3 [M + H]⁺ | C₃₂H₆₈N₈O₁₄ | 438.52 |
| AL5 | [chemical structure] | 527.6 [M + H]⁺ | C₁₉H₃₈N₆O₉S | 526.60 |
| AL6 | [chemical structure] | 324.2 [M + H]⁺ | C₁₁H₂₅N₅O₄S.H COOH | 369.44 |
| AL7 | [chemical structure] | 338.2 [M + H]⁺ | C₁₁H₂₃N₅O₅S.H COOH | 383.42 |
| AL8 | [chemical structure] | 410.0 [M + H]⁺ | C₁₄H₂₇N₅O₅S₂.C F₃COOH | 523.55 |
| AL9 | [chemical structure] | 520.3 [M + H]⁺ | C₂₃H₃₇N₉O₅ | 519.60 |

[0942] According to another embodiment of the present disclosure, linkers L1 may be branched-alkyl azide amine linkers (EL) contain an amine group which directly attaches to the antibody branched-alkyl PEG containing base structure and 2 to 6 azide functional groups (n=2-6).

[0943] Two branched-alkyl azide amine linkers are conjugated to the Q295 residue of antibodies with a WT Fc domain that are enzymatically deglycosylated or antibodies with N297D mutations, resulting in an azido functionalized antibody with two attachments and 4-12 azide functional groups (2 times n, where n is the number of azides on each branched BL1 linker) available for further modification. Four branched-alkyl azide amine linkers are conjugated to the Q295 and Q297 residues of antibodies with an N297Q mutation in the Fc domain, resulting in an azido functionalized antibody with four attachments and 8-24 azide functional groups (4 times n) available for further modification. The basic component structures of possible Branched-alkyl azide amine linkers are listed in FIG. 4B. Specific structures synthesized as examples are provided in Table 15.

TABLE 15
Branched linkers synthesized as examples

| | | LC- | | |
|---|---|---|---|---|
| | | MS | | |
| | | m/z | | |
| Cpd# | Structure | (100%) | MF | FW |
| BL1 | [chemical structure] | 445.3 [M + H]⁺ | C₁₆H₃₂ N₁₀O₅. CF₃CO OH | 558.51 |
| BL2 | [chemical structure] | 709.5 [M + H]⁺ | C₂₈H₅₆ N₁₀O₁₁ | 708.8 |
| BL3 | [chemical structure] | 576.4 [M + H]⁺ | C₂₁H₄₁ N₁₁O₈ | 575.63 |
| BL4 | [chemical structure] | 883.5 [M + H]⁺ | C₃₆H₇₀ N₁₀O₁₅ | 883.00 |
| BL5 | [chemical structure] | 707.4 [M + H]⁺ | C₂₈H₅₄ N₁₀O₁₁ | 706.79 |
| BL6 | [chemical structure] | 921.6 [M + H]⁺ | C₃₆H₆₈ N₁₄O₁₄ | 921.01 |
| BL7 | [chemical structure] | 326.2 [M + H]⁺ | C₁₂H₂₃ N₉O₂ | 325.38 |
| BL10 | [chemical structure] | 1488.2 [M + H]⁺ | C₅₂H₈₆ N₂₀O₂₉ S | 1487.42 |
| BL11 | [chemical structure] | 884.5 [M + H]⁺ | C₂₀H₃₇ N₁₃O₈ | 587.59 |
| BL12 | [chemical structure] | | | 550.66 |

[0944] Amino-azido linkers AL1 (CAS: 134179-38-7), AL2 (CAS: 951671-92-4), AL3 (CAS: 957486-82-7) and AL4 (CAS: 857891-82-8) were commercially obtained. Amino-tetrazine linker AL10 (CAS: 2055646-21-2) was reported in WO2016209062, incorporated by reference herein. Branched linker BL7 (CAS: 2253947-15-6) was reported in WO2018218004, incorporated by reference herein.

### Example 10: Synthesis of AL5 Linker

[0945] Amino-azido linker AL5 was synthesized as described in Scheme 14 and Examples 10A-10D, below.

[chemical structure]

### Example 10A: Methyl (2S)-2-(2-{[(tert-butoxy)carbonyl]amino}ethanesulfonamido)-6-{[(9H-fluoren-9-ylmethoxy)carbonyl]amino}hexanoate (AL5-3)

[chemical structure]

[0947] To a solution of H-Lys(Fmoc)-OMe-HCl (AL5-1, CAS: 201009-98-5) (0.38 g, 1.0 mmol) in DCM (10 mL) were added triethylamine (0.30 g, 3.0 mmol), DMAP (0.12 g, 1.0 mmol) and compound AL5-2 (CAS: 134019-73-1) (0.25 g, 1.0 mmol). The reaction was stirred at RT for 4 hours; reaction completion was monitored by LCMS. The mixture was directly purified by reversed phase flash chromatography (0-100% acetonitrile in aq. TFA (0.01%)) to give compound AL5-3 (0.30 g, 50% yield) as viscous oil. ESI m/z: 612.3 (M+Na)⁺.

### Example 10B: Methyl (2S)-2-(2-aminoethanesulfonamido)-6-{[(9H-fluoren-9-ylmethoxy)carbonyl]amino}hexanoate (AL5-4)

[chemical structure]

[0949] To a solution of compound AL5-3 (0.30 g, 0.51 mmol) in DCM (10 mL) was added TFA (2 mL), and the reaction mixture was stirred at RT for 4 hours until Boc was totally removed, which was monitored by LCMS. The resulting mixture was concentrated in vacuo and the residue was purified by reversed phase flash chromatography (0-100% acetonitrile in aq. TFA (0.01%)) to give compound AL5-4 (0.20 g, 80% yield) as viscous oil. ESI m/z: 490.1 (M+H)⁺.

### Example 10C: Methyl (2S)-2-[2-(1-azido-3,6,9,12-tetraoxapentadecan-15-amido) ethanesulfonamido]-6-{[(9H-fluoren-9-ylmethoxy)carbonyl]amino}hexanoate (AL5-6)

[chemical structure]

[0951] To a solution of compound AL5-5 (0.12 g, 0.41 mmol) in DMF (10 mL) were added compound HATU (0.16 g, 0.42 mmol) and DIPEA (0.11 g, 0.85 mmol), and the reaction mixture was stirred at RT for 10 minutes before the addition of compound AL5-4 (0.20 g, 0.41 mmol). The reaction mixture was stirred at RT for 2 hours. The resulting mixture was directly purified by reversed phase flash chromatography (0-100% acetonitrile in aq. ammonium bicarbonate (10 mM)) to give compound AL5-6 (0.25 g, 80% yield) as colorless oil. ESI m/z: 763.3 (M+H)⁺.

### Example 10D: (2S)-6-Amino-2-[2-(1-azido-3,6,9,12-tetraoxapentadecan-15-amido) ethanesulfonamido]hexanoic acid (AL5)

[chemical structure]

[0953] To a solution of compound AL5-6 (25 mg, 33 μmol) in ethanol (0.5 mL) was added aq. lithium hydroxide (0.33 M, 0.5 mL), and the reaction mixture was stirred at RT for 2 hours, which was monitored by LCMS. The reaction was quenched with aq. hydrochloride (1 M) to pH 7 and the resulting mixture was directly separated by reversed phase flash chromatography (0-100% acetonitrile in aq. formic acid (0.01%)) to give amino-azido linker AL5 (5.0 mg, 28% yield) as colorless oil. ESI m/z: 527.3 (M+H)⁺. ¹H NMR (400 MHz, DMSO_{d6}) δ 8.20 (s, 1H), 7.90-7.80 (m, 2H), 7.50-7.40 (m, 1H), 3.80-3.10 (m, 27H), 3.10-3.05 (m, 1H), 2.80-2.75 (m, 1H), 2.35-2.30 (m, 1H), 1.80-1.50 (m, 2H), 1.45-1.40 (m, 1H) ppm. (Acid proton was not revealed. No aldehyde proton indicated that the linker was not formic acid salt form.)

### Example 11: Synthesis of AL6 Linker

[0954] Amino-azido linker AL6 was synthesized as described in Scheme 15 and Examples 11A-11B, below.

[chemical structure]

### Example 11A: N-{2-[2-(2-Azidoethoxy)ethoxy]ethyl}-5-(1,3-dioxo-2,3-dihydro-1H-isoindol-2-yl)pentane-1-sulfonamide (AL6-3)

[chemical structure]

[0956] To a solution of amino-PEG₂-azide (AL6-2) (0.41 g, 2.4 mmol) in THF (30 mL) was added triethylamine (0.36 g, 3.6 mmol), followed by compound AL6-1 (0.83 g, 2.6 mmol, CAS: 63345-34-6) at 0° C. The reaction mixture was stirred at 30° C. for 12 hours, which was monitored by LCMS. The resulting mixture was concentrated in vacuo to give crude AL6-3 (0.91 g) as yellow oil, which was used for the next step without further purification. ESI m/z: 454.2 (M+H)⁺.

### Example 11B: 5-Amino-N-{2-[2-(2-azidoethoxy)ethoxy]ethyl}pentane-1-sulfonamide (AL6)

[chemical structure]

[0958] To a solution of compound AL6-3 (0.90 g, 1.9 mmol) in ethanol (10 mL) was added hydrazine hydrate (85%, 2.2 g, 38 mmol) at 0° C., and the reaction mixture was stirred at 30° C. for 2 hours, which was monitored by LCMS. The resulting mixture was concentrated in vacuo and the residue was purified by reversed phase flash chromatography (10-30% acetonitrile in aq. formic acid (0.225%)) to give amino-azido linker AL6 (0.18 g, 20% yield in 2 steps from AL6-2, formic acid salt) as a white solid. ESI m/z: 324.2 (M+H)⁺. ¹H NMR (400 MHz, DMSO_{d6}) δ 8.43 (br s, 1H), 3.63-3.58 (m, 2H), 3.57-3.51 (m, 4H), 3.45 (t, J=5.8 Hz, 2H), 3.41-3.36 (m, 2H), 3.08 (t, J=5.9 Hz, 2H), 3.03-2.95 (m, 2H), 2.75-2.64 (m, 2H), 1.69-1.57 (m, 2H), 1.56-1.46 (m, 2H), 1.44-1.33 (m, 2H) ppm.

### Example 12: Synthesis of AL7 linker

[0959] Amino-azido linker AL7 was synthesized as described in Scheme 16 and Examples 12A-12B, below.

[chemical structure]

### Example 12A: tert-Butyl N-[4-({3-[2-(2-azidoethoxy)ethoxy]propanamido}sulfonyl) butyl]carbamate (AL7-3)

[chemical structure]

[0961] To a solution of compound AL7-2 (14 mg, 69 μmol, CAS: 1312309-63-9) in DCM (1.5 mL) was added HATU (29 mg, 76 μmol) at 25° C. The resulting mixture was stirred at 25° C. for 2 hours before the addition of cesium carbonate (49 mg, 0.15 mmol) and compound AL7-1 (21 mg, 83 μmol, CAS: 1862014-38-7). The reaction mixture was then stirred at 25° C. for 16 hours. Reaction completion was monitored by LCMS. The resulting mixture was diluted with DCM (8.0 mL) and quenched with water (4.0 mL). The two-phase mixture was acidified with aq. potassium bisulfate (0.5 M) to pH 5. The organic solution was separated and washed with water (4.0 mL) and brine (4.0 mL), dried over anhydrous sodium sulfate and concentrated in vacuo. The residue was purified by reversed phase flash chromatography (0-45% acetonitrile in aq. acetic acid (0.4%)) to give compound AL7-3 (15 mg, 45% yield) as a yellow solid. ESI m/z: 438.2 (M+H)⁺. ¹H NMR (400 MHz, CDCl₃) δ 4.64 (brs, 1H), 3.82-3.76 (m, 2H), 3.75-3.66 (m, 6H), 3.51-3.41 (m, 4H), 3.16 (br d, J=6.9 Hz, 2H), 2.66-2.59 (m, 2H), 1.92-1.83 (m, 2H), 1.65 (quin, J=7.3 Hz, 2H), 1.45 (s, 9H) ppm.

### Example 12B: N-(4-aminobutanesulfonyl)-3-[2-(2-azidoethoxy)ethoxy]propanamide (AL7)

[chemical structure]

[0963] To a solution of compound AL7-3 (8.0 mg, 18 μmol) in DCM (1.5 mL) was added TFA (0.3 μL, 4.1 μmol), and the reaction mixture was stirred at 20° C. for 2 hours until Boc was totally removed, which was monitored by LCMS. The resulting mixture was concentrated in vacuo and the residue was purified by reversed phase flash chromatography (8-28% acetonitrile in aq. formic acid (0.225%)) to give amino-azido linker AL7 (6.0 mg, 86% yield, formic acid salt) as a white solid. ESI m/z: 338.2 (M+H)⁺. ¹H NMR (400 MHz, DMSO_{d6}) δ 3.63-3.59 (m, 2H), 3.57-3.53 (m, 4H), 3.51-3.46 (m, 4H), 2.97 (br s, 2H), 2.79 (br s, 2H), 2.20 (t, J=7.2 Hz, 2H), 1.60 (br s, 4H) ppm.

### Example 13: Synthesis of AL8 Linker

[0964] Amino-azido linker AL8 was synthesized as described in Scheme 17 and Examples 13A-13C, below.

[chemical structure]

### Example 13A: (2R)-2-Amino-3-[(2-{[(tert-butoxy)carbonyl]amino}ethyl)disulfanyl]-3-methylbutanoic acid (AL8-2)

[chemical structure]

[0966] To a solution of compound AL8-1 (1.0 g, 1.8 mmol, CAS: 535943-48-7) in methanol (20 mL) was added L-penicillamine (0.78 g, 5.2 mmol, CAS: 1113-41-3), and the reaction mixture was stirred at 25° C. for 18 hours. Reaction completion was monitored by LCMS. The resulting mixture was concentrated in vacuo and the residue was purified by reversed phase flash chromatography (15-35% acetonitrile in aq. formic acid (0.225%)) to give compound AL8-2 (0.52 g, 80% yield, formic acid salt) as a white solid. ¹H NMR (400 MHz, DMSO_{d6}) δ 6.97 (br t, J=5.6 Hz, 1H), 3.27 (s, 1H), 3.21-3.12 (m, 2H), 2.77 (t, J=6.9 Hz, 2H), 1.45 (s, 3H), 1.37 (s, 9H), 1.24 (s, 3H) ppm.

### Example 13B: (2R)-2-{3-[2-(2-Azidoethoxy)ethoxy]propanamido}-3-[(2-{[(tert-butoxy)carbonyl]amino}ethyl)disulfanyl]-3-methylbutanoic acid (AL8-4)

[chemical structure]

[0968] To a solution of compound AL8-2 (0.20 g, 0.54 mmol, formic acid salt) in DMF (2 mL) were added DIPEA (0.14 g, 1.1 mmol) and compound AL8-3 (0.20 g, 0.67 mmol, CAS: 1312309-64-0), and the reaction mixture was stirred at 25° C. for 2 hours. Reaction completion was monitored by LCMS. The resulting mixture was concentrated in vacuo, and the residue was purified by reversed phase flash chromatography (40-60% acetonitrile in aq. formic acid (0.225%)) to give compound AL8-4 (0.20 g, 73% yield) as colorless oil. ¹H NMR (400 MHz, DMSO_{d6}) δ 8.20-8.07 (m, 1H), 6.91 (br t, J=5.4 Hz, 1H), 4.50 (d, J=9.0 Hz, 1H), 3.63-3.57 (m, 4H), 3.56-3.52 (m, 2H), 3.51-3.48 (m, 2H), 3.39 (br s, 2H), 3.18-3.12 (m, 2H), 2.79-2.67 (m, 2H), 2.48-2.36 (m, 2H), 1.37 (s, 9H), 1.35 (s, 3H), 1.29 (s, 3H) ppm.

### Example 13C: (2R)-3-[(2-Aminoethyl)disulfanyl]-2-{3-[2-(2-azidoethoxy)ethoxy]propanamido}-3-methylbutanoic acid (AL8)

[chemical structure]

[0970] To a solution of compound AL8-4 (0.25 g, 0.49 mmol) in DCM (2.0 mL) was added TFA (2.0 mL), and the reaction mixture was stirred at 25° C. for an hour, which was monitored by TLC. The mixture was concentrated in vacuo to give crude linker AL8 (0.20 g) as a TFA salt. The crude salt (45 mg, 86 μmol) was dissolved in mixture of solvent of DMF (1 mL) and methanol (1 mL) and the resulting solution was subjected to reversed phase flash chromatography (12-32% acetonitrile in aq. ammonia (0.05%)) to provide AL8 (12 mg, 33% yield, ammonium salt) as a white solid. ESI m/z: 410.2 (M+H)⁺. ¹H NMR (400 MHz, D₂O) δ 4.44 (s, 1H), 3.82 (t, J=5.7 Hz, 2H), 3.76-3.65 (m, 6H), 3.55-3.47 (m, 2H), 3.36 (t, J=6.4 Hz, 2H), 3.09-2.95 (m, 2H), 2.71-2.54 (m, 2H), 1.46 (s, 3H), 1.41 (s, 3H) ppm.

[0971] ¹H NMR (400 MHz, DMSO_{d6}) for AL8 TFA salt: δ 8.25-8.16 (m, 1H), 7.88 (br s, 3H), 4.56 (d, J=9.3 Hz, 1H), 3.63-3.48 (m, 8H), 3.43-3.36 (m, 2H), 3.12-3.00 (m, 2H), 2.93-2.87 (m, 2H), 2.47-2.38 (m, 2H), 1.37 (s, 3H), 1.31 (s, 3H) ppm.

### Example 14: Synthesis of AL9 Linker

[0972] Amino-azido linker AL9 was synthesized as described in Scheme 18 and Examples 14A-14C, below.

[chemical structure]

### Example 14A: tert-Butyl N-[2-(2-{[(1 S)-1-{[(1 S)-4-(carbamoylamino)-1-{[4-(hydroxymethyl)phenyl]carbamoyl}butyl]carbamoyl}-2-methylpropyl]carbamoyl}ethoxy)ethyl]carbamate (AL9-2)

[chemical structure]

[0974] To a solution of vcPAB (0.60 g, 1.6 mmol, CAS: 159857-79-1) in DMF (5 mL) were added HATU (0.60 g, 1.6 mmol), DIPEA (0.61 g, 4.7 mmol) and AL9-1 (0.41 g, 1.7 mmol, CAS: 1260092-44-1), and the reaction mixture was stirred at 25° C. for 12 hours. Reaction completion was monitored by LCMS. The mixture was concentrated in vacuo and the residue was purified by reversed phase flash chromatography (0-35% acetonitrile in water) to give compound AL9-2 (0.85 g, 86% yield) as a white solid. ESI m/z: 495.3 (M−Boc+H)⁺. ¹H NMR (400 MHz, DMSO_{d6}) δ 9.89 (s, 1H), 8.10 (d, J=7.4 Hz, 1H), 7.86 (d, J=8.5 Hz, 1H), 7.54 (d, J=8.4 Hz, 2H), 7.22 (d, J=8.4 Hz, 2H), 6.70 (br s, 1H), 6.02-5.91 (m, 1H), 5.40 (s, 2H), 5.08 (t, J=5.6 Hz, 1H), 4.42 (d, J=5.4 Hz, 2H), 4.26-4.20 (m, 1H), 3.62-3.53 (m, 3H), 3.07-2.88 (m, 6H), 2.03-1.91 (m, 1H), 1.68 (br d, J=8.9 Hz, 1H), 1.63-1.50 (m, 1H), 1.36 (s, 13H), 0.86 (d, J=6.8 Hz, 3H), 0.82 (d, J=6.8 Hz, 3H) ppm.

### Example 14B: tert-Butyl N-[2-(2-{[(1 S)-1-{[(1 S)-1-{[4-(azidomethyl)phenyl]carbamoyl}-4-(carbamoylamino)butyl]carbamoyl}-2-methylpropyl]carbamoyl}ethoxy)ethyl]carbamate (AL9-3)

[chemical structure]

[0976] To a solution of compound AL9-2 (0.40 g, 0.67 mmol) in toluene (18 mL) and DMF (2 mL) were added DBU (0.26 g, 1.7 mmol) and DPPA (0.46 g, 1.7 mmol). The mixture was stirred at 25° C. for 12 hours. Reaction completion was monitored by LCMS. The resulting mixture was concentrated in vacuo and the residue was purified by flash silica gel chromatography (0-12% methanol in DCM) to give compound AL9-3 (0.32 g, 61% yield) as a white solid. ¹H NMR (400 MHz, DMSO_{d6}) δ 10.03 (s, 1H), 8.14 (br d, J=6.8 Hz, 1H), 7.87 (br d, J=8.8 Hz, 1H), 7.63 (d, J=8.5 Hz, 2H), 7.31 (d, J=8.4 Hz, 2H), 6.78-6.66 (m, 1H), 6.02-5.93 (m, 1H), 5.41 (s, 2H), 4.37 (s, 2H), 4.24 (br t, J=7.6 Hz, 1H), 3.63-3.52 (m, 3H), 3.08-2.88 (m, 6H), 2.01-1.92 (m, 1H), 1.72-1.65 (m, 1H), 1.65-1.59 (m, 1H), 1.36 (s, 13H), 0.86 (br d, J=6.8 Hz, 3H), 0.83 (br d, J=6.6 Hz, 3H) ppm.

### Example 14C: (2S)-2-[(2S)-2-[3-(2-Aminoethoxy)propanamido]-3-methylbutanamido]-N-[4-(azidomethyl)phenyl]-5-(carbamoylamino)pentanamide (AL9)

[chemical structure]

[0978] To a solution of hydrochloride in dioxane (4 N, 5 mL) was added compound AL9-3 (0.17 g, 0.21 mmol), and the resulting solution was stirred at 25° C. for 2 hours until Boc was totally removed, which was monitored by LCMS. The mixture was directly purified by reversed phase flash chromatography (34-74% acetonitrile in aq. ammonia (0.05%)) to give linker AL9 (68 mg, 61% yield) as a white solid. ESI m/z: 520.3 (M+H)⁺. ¹H NMR (400 MHz, DMSO_{d6}) δ 10.04 (s, 1H), 8.16 (br d, J=7.4 Hz, 1H), 7.90 (br d, J=8.4 Hz, 1H), 7.63 (d, J=8.5 Hz, 2H), 7.31 (d, J=8.5 Hz, 2H), 6.06-5.94 (m, 1H), 5.42 (s, 2H), 4.44-4.33 (m, 3H), 4.24 (br dd, J=6.8, 8.6 Hz, 1H), 3.65-3.54 (m, 2H), 3.07-2.90 (m, 2H), 2.68-2.65 (m, 2H), 2.46-2.34 (m, 4H), 2.00-1.93 (m, 1H), 1.81-1.21 (m, 6H), 0.86 (d, J=6.8 Hz, 3H), 0.83 (d, J=6.8 Hz, 3H) ppm.

### Example 15: Synthesis of Branched Linkers BL1 and BL2

[0979] Branched linkers BL1 and BL2 were synthesized as described in Scheme 19 and Examples 15A-15F, below.

[chemical structure]

### Example 15A: Ethyl 1-{[(tert-butoxy)carbonyl]amino}-12-(2-ethoxy-2-oxoethyl)-3,6,9-trioxa-12-azatetradecan-14-oate (BL1-2)

[chemical structure]

[0981] To a solution of compound BL1-1 (CAS: 101187-40-0) (0.29 g, 1.0 mmol) in acetonitrile (50 mL) were added ethyl bromoacetate (0.37 g, 2.2 mmol) and sodium carbonate (0.27 g, 2.5 mmol), and the reaction mixture was stirred at 50° C. for 16 hours. Reaction completion was monitored by TLC (R_{f}=0.6, 10% methanol in DCM). After cooling to RT, the mixture was filtered and the filtrate was concentrated in vacuo to give crude product BL1-2 (0.40 g, 86% crude yield) as a yellow oil, which was used for the next step without further purification. ESI m/z: 465.1 (M+H)⁺.

### Example 15B: 1-{[(tert-Butoxy)carbonyl]amino}-12-(carboxymethyl)-3,6,9-trioxa-12-azatetradecan-14-oic acid (BL1-3)

[chemical structure]

[0983] To a solution of crude compound BL1-2 (0.23 g, 0.50 mmol, obtained above) in methanol (5 mL) was added aq. sodium hydroxide (2 M, 5 mL). The reaction mixture was stirred at RT for 4 hours. The methanol was removed in vacuo and the residual aqueous solution was acidified to pH 3 with aq. hydrochloride (1 N). The resulting mixture was extracted with DCM (10 mL×3) and the combined organic solution was dried over anhydrous sodium sulfate and concentrated in vacuo to give crude product BL1-3 (81 mg, 40% yield) as a colorless oil. ESI m/z: 409.1 (M+H)⁺. ¹H NMR (400 MHz, DMSO_{d6}) δ 3.55-3.35 (m, 17H), 3.08-3.06 (m, 4H), 1.37 (s, 9H) ppm.

### Example 15C: tert-Butyl N-{1-[(2-azidoethyl)carbamoyl]-2-{[(2-azidoethyl) carbamoyl]methyl}-5,8,11-trioxa-2-azatridecan-13-yl}carbamate (BL1-5)

[chemical structure]

[0985] To a solution of compound BL1-3 (75 mg, 0.18 mmol) and 2-azidoethanamine BL1-4 (47 mg, 0.55 mmol) in DMF (5 mL) were added HATU (0.21 g, 0.55 mmol) and DIPEA (0.14 g, 1.1 mmol), and the reaction mixture was stirred at RT for 4 hours, which was monitored by LCMS. The resulting mixture was directly reversed phase flash chromatography (30-90% acetonitrile in aq. ammonium bicarbonate (10 mM)) to give compound BL1-5 (63 mg, 64% yield) as colorless oil. ESI m/z: 545.3 (M+H)⁺.

### Example 15D: 1-Amino-N-(2-azidoethyl)-12-{[(2-azidoethyl)carbamoyl]methyl}-3,6,9-trioxa-12-azatetradecan-14-amide, TFA salt (BL1)

[chemical structure]

[0987] To a solution of compound BL1-5 (0.10 g, 0.18 mmol) in DCM (10 mL) was added TFA (3 mL), and the reaction mixture was stirred at RT for an hour. The volatiles were removed in vacuo and the residue was purified by reversed phase flash chromatography (0-100% acetonitrile in aq. TFA (0.01%)) to give branched linker BL1 (25 mg, 31% yield, TFA salt) as a colorless oil. ESI m/z: 445.2 (M+H)⁺. ¹H NMR (500 MHz, DMSO_{d6}) δ 8.48 (br s, 2H), 7.88 (br s, 3H), 3.63-3.50 (m, 16H), 3.42-3.38 (m, 4H), 3.34-3.28 (m, 4H), 3.05-2.95 (m, 4H) ppm.

### Example 15E: tert-Butyl N-{1-[(2-{2-[2-(2-azidoethoxy)ethoxy]ethoxy}ethyl) carbamoyl]-2-{[(2-{2-[2-(2-azidoethoxy)ethoxy]ethoxy}ethyl) carbamoyl]methyl}-5,8,11-trioxa-2-azatridecan-13-yl}carbamate (BL2-5)

[chemical structure]

[0989] Following the similar procedure as compound BL1-5 except substituting BL2-4 for BL1-4, compound BL2-5 (0.27 g, 74% yield) was obtained as a colorless oil. ESI m/z: 809.5 (M+H)⁺.

### Example 15F: 1-Amino-N-(2-{2-[2-(2-azidoethoxy)ethoxy]ethoxy}ethyl)-12-{[(2-{2-[2-(2-azidoethoxy)ethoxy]ethoxy}ethyl)carbamoyl]methyl}-3,6,9-trioxa-12-azatetradecan-14-amide (BL2)

[chemical structure]

[0991] Following the similar procedure as BL1 except substituting BL2-5 for BL1-5, branched linker BL2 (94 mg, 39% yield) was obtained as a colorless oil after purification by reversed phase flash chromatography (0-100% acetonitrile in aq. ammonium bicarbonate (10 mM)). ESI m/z: 709.5 (M+H)⁺. ¹H NMR (400 MHz, DMSO_{d6}) δ 8.02 (t, J=5.6 Hz, 2H), 3.60 (t, J=4.4 Hz, 4H), 3.57-3.45 (m, 26H), 3.45-3.37 (m, 8H), 3.34 (t, J=6.0 Hz, 2H), 3.28-3.20 (m, 4H), 3.15 (s, 4H), 2.70-2.60 (m, 4H) ppm.

### Example 16: Synthesis of Branched Linker BL3

[0992] Branched linker BL3 was synthesized as described in Scheme 20 and Examples 16A-16D, below.

[chemical structure]

### Example 16A: tert-Butyl N-[1,3-bis(2-azidoethoxy)-2-[(2-azidoethoxy)methyl]propan-2-yl]carbamate-(BL3-3)

[chemical structure]

[0994] To a solution of 2-azidoethanol (BL3-2) (1.1 g, 13 mmol) in toluene (6 mL) were added DIPEA (1.9 g, 15 mmol) and TFAA (3.7 g, 13 mmol) at −2° C. to 2° C., and the reaction mixture was stirred at 0° C. for 2 hours. To the resulting mixture were added DIPEA (1.9 g, 15 mmol), toluene (6 mL) and compound BL3-1 (CAS: 146651-71-0) (0.24 g, 1.1 mmol), and the reaction mixture was stirred at 40° C. for 72 hours. The reaction was then quenched with pyridine (0.2 mL) and diluted with ethyl acetate (100 mL). The organic solution was washed with aq. citric acid (1 M), aq. sodium bicarbonate (10%), water and brine, dried over anhydrous sodium sulfate and concentrated in vacuo. The residue was purified by reversed phase flash chromatography (0-100% acetonitrile in aq. ammonium bicarbonate (10 mM)) to give compound BL3-3 (30 mg, 6.4% yield) as colorless oil. ESI m/z: 451.0 (M+Na)⁺. ¹HNMR (500 MHz, CDCl₃) δ 3.78 (s, 6H), 3.66 (t, J=5.0 Hz, 6H), 3.34 (t, J=5.0 Hz, 6H), 1.43 (s, 9H) ppm.

### Example 16B: 1,3-Bis(2-azidoethoxy)-2-[(2-azidoethoxy)methyl]propan-2-amine (BL3-4)

[chemical structure]

[0996] To a solution of compound BL3-3 (56 mg, 0.13 mmol) in DCM (4 mL) was added TFA (1 mL), and the reaction mixture was stirred at RT for 2 hours until Boc was totally removed, which was monitored by LCMS. The mixture was concentrated in vacuo to give crude compound BL3-4 (43 mg, 100% crude yield) as yellow oil, which was used for the next step without further purification. ESI m/z: 329.1 (M+H)⁺.

### Example 16C: tert-Butyl N-(14-{[1,3-bis(2-azidoethoxy)-2-[(2-azidoethoxy)methyl]propan-2-yl]carbamoyl}-3,6,9,12-tetraoxatetradecan-1-yl)carbamate (BL3-6)

[chemical structure]

[0998] To a solution of compound BL3-5 (53 mg, 0.14 mmol) in DMF (3 mL) was added HATU (69 mg, 0.18 mmol), and the mixture was stirred at RT for 5 minutes. To the stirred solution were added a solution of crude compound BL3-4 (43 mg), which was obtained above, in DMF (1 mL) and DIPEA (50 mg, 0.39 mmol) successively. The resulting mixture was stirred at RT for an hour. Reaction completion was monitored by LCMS. The reaction solution was directly purified by reversed phase flash chromatography (0-100% acetonitrile in aq. ammonium bicarbonate (10 mM)) to give compound BL3-6 (65 mg, 73% yield in 2 steps) as a colorless oil. ESI m/z: 676.4 (M+H)⁺.

### Example 16D: 1-Amino-N-[1,3-bis(2-azidoethoxy)-2-[(2-azidoethoxy) methyl]propan-2-yl]-3,6,9,12-tetraoxapentadecan-15-amide (BL3)

[chemical structure]

[1000] To a solution of compound BL3-6 (65 mg, 96 μmol) in DCM (4 mL) was added TFA (1 mL), and the reaction mixture was stirred at RT for 2 hours until Boc was totally removed, which was monitored by LCMS. The volatiles were removed in vacuo and the residue was purified by reversed phase flash chromatography (0-100% acetonitrile in aq. ammonium bicarbonate (10 mM)) to give branched linker BL3 (44 mg, 79% yield) as colorless oil. ESI m/z: 576.3 (M+H)⁺.

[1001] ¹H NMR (500 MHz, DMSO_{d6}) δ 7.25 (s, 1H), 3.69 (s, 6H), 3.56-3.60 (m, 8H), 3.47-3.52 (m, 12H), 3.44 (t, J=5.5 Hz, 4H), 3.35-3.37 (m, 6H), 2.76 (t, J=5.5 Hz, 2H), 2.35 (t, J=6.5 Hz, 2H) ppm.

### Example 17: Synthesis of branched linkers BL4, BL5 and BL6

[1002] Branched linkers BL4, BL5 and BL6 were synthesized as described in Scheme 21 and Examples 17A-17H, below.

[chemical structure]

### Example 17A: 3-[2-(1-{[(tert-Butoxy)carbonyl]amino}-3,6,9,12-tetraoxapentadecan-15-amido)-3-(2-carboxyethoxy)propoxy]propanoic acid (BL4-3)

[chemical structure]

[1004] To a solution of compound BL4-1 (0.15 g, 0.64 mmol, CAS: 1020112-73-5) in DMF (5 mL) were added DIPEA (0.16 g, 1.3 mmol) and Boc-N-amido-PEG4-NHS ester (BL4-2) (0.37 g, 0.80 mmol, CAS: 859230-20-9), and the reaction mixture was stirred at 25° C. for an hour, Reaction completion was monitored by LCMS. The reaction mixture was concentrated in vacuo and the residue was purified by prep-HPLC (20-40% acetonitrile in aq. ammonia hydroxide (0.05% vol.)) to give compound BL4-3 (0.15 g, 39% yield) as a colorless oil. ESI m/z: 605.2 (M+Na)⁺. ¹H NMR (400 MHz, DMSO_{d6}) δ 7.71 (d, J=8.1 Hz, 1H), 6.75 (br s, 1H), 4.01-3.88 (m, 1H), 3.58 (t, J=6.3 Hz, 6H), 3.52-3.44 (m, 14H), 3.39-3.36 (m, 4H), 3.09-3.02 (m, 2H), 2.43 (t, J=6.3 Hz, 3H), 2.32 (t, J=6.4 Hz, 2H), 1.37 (s, 9H) ppm.

### Example 17B: tert-Butyl N-(14-{[1,3-bis({2-[(2-{2-[2-(2-azidoethoxy)ethoxy]ethoxy}ethyl)carbamoyl]ethoxy})propan-2-yl]carbamoyl}-3,6,9,12-tetraoxatetradecan-1-yl)carbamate (BL4-5)

[chemical structure]

[1006] To a solution of compound BL4-3 (75 mg, 0.13 mmol) in DMF (2 mL) were added DIPEA (0.10 g, 0.77 mmol), HATU (0.15 g, 0.39 mmol) and compound BL2-4 (70 mg, 0.32 mmol), and the reaction mixture was stirred at 25° C. for 12 hours. Reaction completion was monitored by LCMS. The resulting mixture was concentrated in vacuo and the residue was purified by prep-HPLC (33-53% acetonitrile in aq. formic acid (0.225%)) to give compound BL4-5 (50 mg, 40% yield) as a colorless oil. ESI m/z: 983.6 (M+H)⁺. ¹H NMR (400 MHz, MeODd₄) δ 4.13 (quin, J=5.4 Hz, 2H), 3.76-3.68 (m, 12H), 3.66-3.58 (m, 19H), 3.56-3.46 (m, 12H), 3.22 (t, J=5.6 Hz, 4H), 2.54 (t, J=6.1 Hz, 8H), 2.47 (t, J=6.3 Hz, 4H), 1.44 (s, 13H) ppm.

### Example 17C: 1-Amino-N-[1,3-bis({2-[(2-{2-[2-(2-azidoethoxy)ethoxy]ethoxy}ethyl)carbamoyl]ethoxy})propan-2-yl]-3,9,12-tetraoxapentadecan-15-amide (BL4)

[chemical structure]

[1008] A mixture of compound BL4-5 (30 mg, 31 μmol) in a solution of hydrochloride in methanol (4 M, 5 mL) was stirred at 25° C. for an hour until Boc was totally removed, which was monitored by TLC (eluted by ethyl acetate). The reaction mixture was then concentrated in vacuo and the residue was purified by prep-HPLC (35-55% acetonitrile in aq. ammonia hydroxide (0.05%)) to give branched linker BL4 (15 mg, 33% yield) as a colorless oil. ESI m/z: 883.5 (M+H)⁺. ¹H NMR (400 MHz, MeODd₄) δ 4.17-4.08 (m, 2H), 3.80-3.69 (m, 20H), 3.67-3.61 (m, 19H), 3.52-3.44 (m, 8H), 3.15 (br d, J=4.3 Hz, 4H), 2.58 (t, J=6.0 Hz, 8H), 2.49 (t, J=5.9 Hz, 4H) ppm.

### Example 17D: tert-Butyl N-(14-{[1,3-bis(2-{[2-(2-azidoethoxy)ethyl]carbamoyl}ethoxy)propan-2-yl]carbamoyl}-3,6,9,12-tetraoxatetradecan-1-yl)carbamate (BL5-5)

[chemical structure]

[1010] Following the similar procedure of BL4-5 except substituting BL5-4 for BL2-4, compound BL5-5 (0.10 g, 61% yield) was obtained as a colorless oil. ESI m/z: 807.5 (M+H)⁺. ¹H NMR (400 MHz, DMSO_{d6}) δ 7.90 (t, J=5.5 Hz, 2H), 7.72 (d, J=8.3 Hz, 1H), 6.78-6.70 (m, 1H), 3.96-3.88 (m, 1H), 3.62-3.54 (m, 10H), 3.52-3.42 (m, 16H), 3.41-3.35 (m, 10H), 3.26-3.18 (m, 4H), 3.10-3.02 (m, 2H), 2.38-2.27 (m, 6H), 1.37 (s, 9H) ppm.

### Example 17E: 1-Amino-N-[1,3-bis(2-{[2-(2-azidoethoxy)ethyl]carbamoyl}ethoxy) propan-2-yl]-3,6,9,12-tetraoxapentadecan-15-amide (BL5)

[chemical structure]

[1012] To a solution of compound BL5-5 (0.10 g, 0.12 mmol) in DCM (2 mL) was added TFA (2 mL). The mixture was stirred at 25° C. for an hour. Reaction completion was monitored by TLC (eluted with ethyl acetate). The resulting mixture was concentrated in vacuo and the residue was purified by prep-HPLC (35-55% acetonitrile in aq. ammonia (0.05%)) to give branched linker BL5 (40 mg, 45% yield) as a colorless oil. ESI m/z: 707.5 (M+H)⁺. ¹H NMR (400 MHz, CDCl₃) δ 6.98 (br d, J=8.0 Hz, 1H), 6.64 (br s, 2H), 4.22 (td, J=4.6, 8.8 Hz, 1H), 3.80-3.37 (m, 40H), 2.89 (t, J=5.1 Hz, 2H), 2.51 (t, J=6.0 Hz, 2H), 2.45 (t, J=5.9 Hz, 4H) ppm.

### Example 17F: 3-[2-(1-{[(tert-Butoxy)carbonyl]amino}-3,6,9,12-tetraoxapentadecan-15-amido)-3-(2-carboxyethoxy)-2-[(2-carboxyethoxy)methyl]propoxy]propanoic acid (BL6-3)

[chemical structure]

[1014] Following the similar procedure of BL4-3 except substituting BL6-1 (CAS: 174362-95-9) for BL4-1, compound BL6-3 (75 mg, 22% yield) was obtained as a white solid. ESI m/z: 685.3 (M+H)⁺. ¹H NMR (400 MHz, MeODd₄) δ 3.78-3.59 (m, 26H), 3.52 (t, J=5.6 Hz, 2H), 3.24 (t, J=5.6 Hz, 2H), 2.50 (t, J=6.3 Hz, 2H), 2.41 (t, J=6.7 Hz, 6H), 1.44 (s, 9H) ppm.

### Example 17G: tert-Butyl N-(14-{[1,3-bis(2-{[2-(2-azidoethoxy)ethyl]carbamoyl}ethoxy)-2-[(2-{[2-(2-azidoethoxy)ethyl]carbamoyl}ethoxy)methyl]propan-2-yl]carbamoyl}-3,6,9,12-tetraoxatetradecan-1-yl)carbamate (BL6-5)

[chemical structure]

[1016] Following the similar procedure of BL4-5 except substituting BL5-4 for BL2-4 and substituting BL6-3 for BL4-3, compound BL6-5 (8 mg, 9% yield) was obtained as a yellow oil. ESI m/z: 1022.4 (M+H)⁺. ¹H NMR (400 MHz, MeODd₄) 63.72-3.49 (m, 40H), 3.43-3.35 (m, 12H), 3.26-3.18 (m, 2H), 2.50-2.41 (m, 8H), 1.44 (s, 9H) ppm.

### Example 17H: 1-Amino-N-[1,3-bis(2-{[2-(2-azidoethoxy)ethyl]carbamoyl} ethoxy)-2-[(2-{[2-(2-azidoethoxy)ethyl]carbamoyl}ethoxy)methyl]propan-2-yl]-3,6,9,12-tetraoxapentadecan-15-amide (BL6)

[chemical structure]

[1018] Following the similar procedure of BL5 except substituting BL6-5 for BL5-5, branched linker BL6 (4 mg, 55% yield) was obtained as a colorless oil. ESI m/z: 921.6 (M+H)⁺.

[1019] ¹H NMR (400 MHz, MeCN_{d3}) δ 6.90 (br s, 3H), 6.83 (br s, 1H), 3.67-3.55 (m, 30H), 3.52 (br t, J=5.6 Hz, 6H), 3.40-3.32 (m, 10H), 2.95 (br s, 2H), 2.47-2.40 (m, 4H), 2.39-2.32 (m, 12H) ppm.

### Example 18: Synthesis of Cyclodextrin Linker BL10

[1020] Cyclodextrin linker BL10 synthesized as described in Scheme 22 and Examples 18A-181, below.

[chemical structure]

[chemical structure]

[1021] Compound BL10-1 was synthesized according to J. Org. Chem., 1995, 60(15), 4786-97.

### Example 18A: (1R,3R,5R,6R,8R,10R,11R,13R,15R,16R,18R,20R,21R,23R,25R, 26R,28R,30R,31S,32R,33S,34R,35S,36R,37S,38R,39S,40R,41S,42R)-33,34,35,36,37,38,39, 40,41,42-Decakis(acetyloxy)-5,10,15,20,25,30-hexakis({[(tert-butyldimethylsilyl)oxy]methyl})-32-(prop-2-en-1-yloxy)-2,4,7,9,12,14,17,19,22,24,27,29-dodecaoxaheptacyclo[26.2.2.2³,⁶. 2⁸,¹¹.2¹³,¹⁶.2¹⁸,²¹.2²³,²⁶]dotetracontan-31-yl acetate (BL10-2)

[chemical structure]

[1023] To a solution of compound BL10-1 (0.38 g, 0.22 mmol) in pyridine (3 mL) was added acetic anhydride (3 mL), and the reaction mixture was stirred at 80° C. for 16 hours. The reaction mixture was concentrated in vacuo and the brown residue was purified by silica gel flash chromatography (0-100% ethyl acetate in petroleum ether) to give compound BL10-2 (0.41 g, 85% yield) as a white solid. ¹H NMR (400 MHz, CDCl₃) δ 5.77 (tdd, J=5.7, 10.9, 16.8 Hz, 1H), 5.57-5.34 (m, 5H), 5.24-4.92 (m, 8H), 4.78-4.60 (m, 5H), 4.30-3.53 (m, 26H), 3.16 (dd, J=2.9, 9.9 Hz, 1H), 2.15-1.91 (m, 33H), 0.93-0.79 (m, 54H), 0.10-0.03 (m, 36H) ppm.

### Example 18B: (1R,3R,5R,6R,8R,10R,11R,13S,15S,16S,18S,20S,21S,23S,25S, 26S,28R,30R,31 S,32R,33R,34S,35R,36S,37R,38S,39S,40R,41S,42R)-33,34,35,36,37,38,39, 40,41,42-Decakis(acetyloxy)-32-{3-[(2-aminoethyl)sulfanyl]propoxy}-5,10,15,20,25,30-hexakis ({[(tert-butyldimethylsilyl)oxy]methyl})-2,4,7,9,12,14,17,19,22,24,27,29-dodecaoxaheptacyclo[26.2.2.2³,⁶.2⁸,¹¹.2¹³,¹⁶.2¹⁸,²¹.2²³,²⁶] dotetracontan-31-yl acetate (BL10-3)

[chemical structure]

[1025] To a solution of compound BL10-2 (8.2 g, 3.8 mmol) in methanol (150 mL) was added cysteamine hydrochloride (4.3 g, 38 mmol), and the reaction mixture was degassed and purged with nitrogen for 3 times and was then stirred at 20° C. under UV light irradiation (A=365 nm) under nitrogen protection for 24 hours. The reaction mixture was then concentrated in vacuo and the residue was dissolved in DCM (100 mL). The solution was washed successively with sat. aq. ammonium chloride (30 mL) and water (30 mL), dried over anhydrous sodium sulfate and concentrated in vacuo. The crude product was purified by silica gel flash chromatography (0-20% methanol in DCM) to give compound BL10-3 (1.5 g, 18% yield) as a white solid. ¹H NMR (400 MHz, MeODd₄) δ 5.55-5.28 (m, 6H), 5.20-5.00 (m, 6H), 4.63-4.43 (m, 5H), 4.28-4.15 (m, 4H), 4.14-4.05 (m, 2H), 4.02-3.59 (m, 20H), 3.52-3.41 (m, 1H), 3.32-3.09 (m, 2H), 2.93-2.81 (m, 1H), 2.79-2.68 (m, 1H), 2.54 (br t, J=6.7 Hz, 2H), 2.17-1.94 (m, 33H), 1.87-1.59 (m, 2H), 0.96-0.74 (m, 54H), 0.12-0.08 (m, 36H) ppm.

### Example 18C: (1R,3R,5R,6R,8R,10R,11R,13S,15S,16S,18S,20S,21S,23S,25S, 26S,28R,30R,31 S,32R,33R,34S,35R,36S,37R,38S,39S,40R,41S,42R)-32,33,34,35,36,37,38, 39,40,41-Decakis(acetyloxy)-5,10,15,20,25,30-hexakis({[(tert-butyldimethylsilyl)oxy]methyl})-42-{3-[(2-{[(9H-fluoren-9-ylmethoxy)carbonyl]amino}ethyl)sulfanyl]propoxy}-2,4,7,9,12,14,17,19,22, 24,27,29-dodecaoxaheptacyclo[26.2.2.2³,⁶.2⁸,¹¹.2¹³,¹⁶.2¹⁸,²¹.2²³,²⁶]dotetracontan-31-yl acetate (BL10-4)

[chemical structure]

[1027] To a solution of compound BL10-3 (1.2 g, 0.54 mmol) in dioxane (20 mL) were added FmocOSu (CAS: 82911-69-1) (0.20 g, 0.59 mmol) and triethylamine (0.16 g, 1.6 mmol), and the reaction mixture was degassed and purged with nitrogen for 3 times before stirred at 20° C. for 16 hours under nitrogen protection. The resulting mixture was diluted with DCM (100 mL) and washed successively with sat. aq. ammonium chloride (20 mL) and water (20 mL). The organic solution was dried over anhydrous sodium sulfate and concentrated in vacuo. The residue was purified by silica gel flash chromatography (0-10% methanol in DCM) to give compound BL10-4 (1.3 g, 99% yield) as a white solid. ¹H NMR (400 MHz, CDCl₃) δ 7.72 (d, J=7.6 Hz, 2H), 7.55 (d, J=7.6 Hz, 2H), 7.38-7.31 (m, 2H), 7.30-7.23 (m, 2H), 5.52-5.29 (m, 6H), 5.21 (br d, J=8.8 Hz, 1H), 5.14-4.92 (m, 6H), 4.80-4.55 (m, 5H), 4.34 (br d, J=7.1 Hz, 2H), 4.25-3.76 (m, 19H), 3.72-3.53 (m, 7H), 3.45-3.25 (m, 3H), 3.08 (dd, J=2.8, 9.9 Hz, 1H), 2.66-2.43 (m, 4H), 2.11-1.88 (m, 33H), 1.72 (br d, J=4.9 Hz, 2H), 0.94-0.72 (m, 54H), 0.07-0.06 (m, 36H) ppm.

### Example 18D: (1R,3R,5R,6R,8R,10R,11R,13S,15S,16S,18S,20S,21S,23S,25S, 26S,28R,30R,31 S,32R,33R,34S,35R,36S,37R,38S,39S,40R,41S,42R)-32,33,34,35,36,37,38, 39,40,41-decakis(acetyloxy)-42-{3-[(2-{[(9H-fluoren-9-ylmethoxy)carbonyl]amino}ethyl) sulfanyl]propoxy}-5,10,15,20,25,30-hexakis(hydroxymethyl)-2,4,7,9,12,14,17,19,22,24,27,29-dodecaoxaheptacyclo[26.2.2.2³,⁶.2⁸,¹¹.2¹³,¹⁶.2¹⁸,²¹.2²³,²⁶]dotetracontan-31-yl acetate (BL10-5)

[chemical structure]

[1029] To a solution of compound BL10-4 (1.3 g, 0.53 mmol) in THF (15 mL) and pyridine (15 mL) was added pyridine hydrofluoride (70%, 3.7 g, 26 mmol), and the reaction mixture was stirred at 20° C. for 48 hours. The resulting mixture was poured into sat. aq. sodium bicarbonate (100 mL), and was then extracted with DCM (100 mL×2). The combined organic solution was dried over anhydrous sodium sulfate and concentrated in vacuo. The crude product was purified by silica gel flash chromatography (0-15% methanol in DCM) to give compound BL10-5 (0.74 g, 75% yield) as a white solid. ¹H NMR (400 MHz, CDCl₃+D₂O) δ 7.74 (d, J=7.6 Hz, 2H), 7.58 (d, J=7.6 Hz, 2H), 7.41-7.34 (m, 2H), 7.32-7.25 (m, 2H), 5.53-5.35 (m, 6H), 5.25 (br s, 1H), 5.13-4.93 (m, 6H), 4.86-4.68 (m, 5H), 4.47-4.30 (m, 2H), 4.25-4.15 (m, 1H), 4.11-3.91 (m, 12H), 3.89-3.57 (m, 13H), 3.51 (br s, 1H), 3.36 (br d, J=5.9 Hz, 2H), 3.28 (br d, J=12.0 Hz, 1H), 2.69-2.43 (m, 4H), 2.14-1.90 (m, 33H), 1.81-1.64 (m, 2H) ppm.

### Example 18E: (1R,3R,5R,6R,8R,10R,11R,13S,15S,16S,18S,20S,21S,23S,25S, 26S,28R,30R,31 S,32R,33R,34S,35R,36S,37R,38S,39S,40R,41S,42R)-32,33,34,35,36,37,38, 39,40,41-Decakis(acetyloxy)-42-{3-[(2-{[(9H-fluoren-9-ylmethoxy)carbonyl]amino}ethyl)sulfanyl]propoxy}-5,10,15,20,25,30-hexakis[(methanesulfonyloxy)methyl]-2,4,7,9,12,14,17,19,22,24,27, 29-dodecaoxaheptacyclo[26.2.2.2³,⁶.2⁸,¹¹.2¹³,¹⁶.2¹⁸,²¹.2²³,²⁶]dotetracontan-31-yl acetate (BL10-6)

[chemical structure]

[1031] To a solution of compound BL10-5 (0.10 g, 56 μmol) in DCM (2 mL) were added methane sulfonyl chloride (0.15 g, 1.4 mmol) and pyridine (0.16 g, 2.0 mmol), and the reaction mixture was stirred at 15° C. for 3 hours. The resulting mixture was poured into sat. aq. sodium bicarbonate (10 mL) and extracted with DCM (10 mL×2). The combined organic solution was washed with aq. hydrochloride (1.0 N, 10 mL) and water (10 mL), dried over anhydrous sodium sulfate and concentrated in vacuo. The residue was purified by silica gel flash chromatography (0-70% ethyl acetate in DCM) to give compound BL10-6 (98 mg, 78% yield) as a white solid. ¹H NMR (400 MHz, CDCl₃) δ 7.74 (d, J=7.6 Hz, 2H), 7.57 (br d, J=7.3 Hz, 2H), 7.42-7.33 (m, 2H), 7.32-7.25 (m, 2H), 5.56-5.36 (m, 5H), 5.33-5.22 (m, 2H), 5.11-4.95 (m, 6H), 4.91-4.75 (m, 5H), 4.70-4.31 (m, 14H), 4.28-4.13 (m, 6H), 3.93-3.79 (m, 5H), 3.73 (br t, J=9.0 Hz, 1H), 3.63 (br s, 1H), 3.48 (br d, J=9.8 Hz, 1H), 3.36 (br d, J=6.4 Hz, 2H), 3.29-3.17 (m, 2H), 3.15-2.98 (m, 18H), 2.70-2.42 (m, 4H), 2.11-1.90 (m, 33H), 1.81-1.64 (br s, 2H) ppm.

### Example 18F: (1R,3R,5R,6R,8R,10R,11R,13S,15S,16S,18S,20S,21S,23S,25S, 26S,28R,30R,31 S,32R,33R,34S,35R,36S,37R,38S,39S,40R,41S,42R)-32,33,34,35,36,37,38, 39,40,41-Decakis(acetyloxy)-5,10,15,20,25,30-hexakis(azidomethyl)-42-{3-[(2-{[(9H-fluoren-9-ylmethoxy)carbonyl]amino}ethyl)sulfanyl]propoxy}-2,4,7,9,12,14,17,19,22,24,27,29-dodecaoxaheptacycl[26.2.2.2³,⁶.2⁸,¹¹.2¹³,¹⁶.2¹⁸,²¹.2²³,²⁶]dotetracontan-31-yl acetate (BL10-7)

[chemical structure]

[1033] To a solution of compound BL10-6 (0.33 g, 0.15 mmol) in dry DMSO (5 mL) was added sodium azide (0.29 g, 4.4 mmol), and the reaction mixture was stirred at 70° C. for 16 hours. The resulting mixture was poured into water (20 mL) and extracted with DCM (20 mL×2). The combined organic solution was dried over anhydrous sodium sulfate and concentrated in vacuo to give a yellow gum (0.31 g), which was dissolved in dioxane (3 mL). To the solution were added FmocOSu (73 mg, 0.22 mmol) and triethylamine (55 mg, 0.55 mmol), and the mixture was degassed and purged with nitrogen for 3 times before stirred under nitrogen protection at 15° C. for 16 hours. The resulting mixture was quenched with sat. aq. ammonium chloride (20 mL) and extracted with DCM (10 mL×2). The combined organic solution was dried over anhydrous sodium sulfate and concentrated in vacuo. The residue was purified by silica gel flash chromatography (0-3% methanol in DCM) to give crude product (0.17 g) as a white solid, which was further purified by prep-TLC (SiO₂, eluted with 6.25% ethanol in DCM) to give compound BL10-7 (0.13 g, 41% yield) as a white solid. HRMS ESI m/z: 1924.6212 (M+H)⁺ (calcd. 1924.6086), 1946.6057 (M+Na)⁺. ¹H NMR (400 MHz, CDCl₃) δ 7.78 (d, J=7.6 Hz, 2H), 7.60 (br d, J=7.3 Hz, 2H), 7.45-7.36 (m, 2H), 7.36-7.29 (m, 2H), 5.53-5.35 (m, 5H), 5.28 (br s, 1H), 5.12-4.97 (m, 5H), 4.96-4.74 (m, 6H), 4.40 (br d, J=7.1 Hz, 2H), 4.24 (br d, J=6.6 Hz, 1H), 4.12-3.91 (m, 6H), 3.88-3.48 (m, 21H), 3.40 (br d, J=5.9 Hz, 2H), 3.27 (br dd, J=2.9, 10.0 Hz, 1H), 2.71-2.47 (m, 4H), 2.11-1.95 (m, 33H), 1.78 (br s, 2H) ppm.

### Example 18G: (1 S,3R,5R,6S,8R,10R,11S,13R,15R,16S,18R,20R,21S,23R,25R, 26S,28R,30R,31R,32R,33R,34R,35R,36R,37R,38R,39R,40R,41 S,42R)-42-{3-[(2-Aminoethyl) sulfanyl]propoxy}-5,10,15,20,25,30-hexakis(azidomethyl)-2,4,7,9,12,14,17,19,22,24,27,29-dodecaoxaheptacyclo[26.2.2.2³,⁶.2⁸,¹¹.2¹³,¹⁶.2¹⁸,²¹.2²³,²⁶]dotetracontan-31,32,33,34,35,36,37,38, 39,40,41-undecol (BL10-8)

[chemical structure]

[1035] To a solution of compound BL10-7 (0.11 g, 57 μmol) in methanol (5 mL) was added sodium methylate (0.12 g, 2.3 mmol), and the reaction mixture was stirred at 20° C. for 16 hours. The resulting mixture was neutralized by addition of ion-exchange resin Amberlyst (R) 15 (hydrogen form) to pH 6.0. The mixture was filtered to remove resin and the filtrate was concentrated in vacuo. The residue was treated with distilled water (40 mL) and washed with MTBE (20 mL×3). The aqueous phase was lyophilized to give a white residue (52 mg), which was suspended into acetonitrile (AR grade, 4 mL). The white suspension was triturated in supersonic wave for 10 minutes, centrifuged at 5000 rpm for 15 minutes and decanted to collect the white solid. The process was repeated 3 times. The resulting white solid was dissolved into distilled water (20 mL) and then lyophilized to give compound BL10-8 (34 mg, 47% yield) as a white solid. ESI m/z: 1240.5 (M+H)⁺. ¹H NMR (400 MHz, DMSO_{d6}+D₂O) δ 4.99 (br s, 1H), 4.83 (br s, 5H), 3.76 (br d, J=10.5 Hz, 7H), 3.70-3.58 (m, 13H), 3.53-3.42 (m, 6H), 3.39-3.24 (m, 12H), 2.91 (br t, J=6.5 Hz, 2H), 2.66-2.59 (m, 2H), 2.55-2.51 (m, 2H), 1.75-1.60 (m, 2H) ppm.

### Example 18H: 9H-Fluoren-9-ylmethyl N-[14-({2-[(3-{[(1 S,3R,5R,6S,8R, 10R,11 S,13R,15R,16S,18R,20R,21S,23R,25R,26S,28R,30R,31 S,32R,33R,34R,35R,36R,37R,3 8R,39R,40R,41R,42R)-5,10,15,20,25,30-hexakis(azidomethyl)-31,33,34,35,36,37,38,39,40,41, 42-undecahydroxy-2,4,7,9,12,14,17,19,22,24,27,29-dodecaoxaheptacyclo[26.2.2.2³,⁶. 2⁸,¹¹.2¹³,¹⁶.2¹⁸,²¹.2²³,²⁶]dotetracontan-32-yl]oxy}propyl)sulfanyl]ethyl}carbamoyl)-3,6,9,12-tetraoxatetradecan-1-yl]carbamate (BL10-10)

[chemical structure]

[1037] To a solution of active ester BL10-9 (9.0 mg, 15 μmol) and compound BL10-8 (19 mg, 15 μmol) in DMF (0.3 mL) was added DIPEA (6.0 mg, 46 μmol), and the reaction mixture was stirred at 25° C. for an hour. The resulting mixture was directly purified by reversed phase flash chromatography (0-70% acetonitrile in aq. acetic acid (0.5%)) twice to give compound BL10-10 (6.7 mg, 24% yield) as a white solid. ¹H NMR (400 MHz, DMSO_{d6}+D₂O) δ 7.89-7.83 (m, 2H), 7.69-7.60 (m, 2H), 7.44-7.37 (m, 2H), 7.35-7.27 (m, 2H), 5.04 (br s, 1H), 4.86 (br s, 5H), 4.30-4.18 (m, 3H), 3.77-3.76 (m, 20H), 3.61-3.51 (m, 10H), 3.50-3.42 (m, 12H), 3.36 (br d, J=5.8 Hz, 14H), 3.28-3.08 (m, 6H), 2.29 (br t, J=6.4 Hz, 2H), 1.77-1.63 (m, 2H) ppm.

### Example 181:1-Amino-N-{2-[(3-{[(1S,3R,5R,6S,8R,10R,11S,13R,15R,16S,18R, 20R,21 S,23R,25R,26S,28R,30R,31S,32R,33R,34R,35R,36R,37R,38R,39R,40R,41R,42R)-5,10,15,20,25,30-hexakis(azidomethyl)-31,33,34,35,36,37,38,39,40,41,42-undecahydroxy-2,4,7, 9,12,14,17,19,22,24,27,29-dodecaoxaheptacyclo[26.2.2.2³,⁶. 2⁸,¹¹.2¹³,¹⁶.2¹⁸,²¹.2²³,²⁶]dotetracontan-32-yl]oxy}propyl)sulfanyl]ethyl}-3,6,9,12-tetraoxapentadecan-15-amide (BL10)

[chemical structure]

[1039] To a solution compound BL10-10 (6.7 mg, 3.9 μmol) in DMF (0.2 mL) was added piperidine (3.3 mg, 39 μmol), and the reaction mixture was stirred at 25° C. for an hour until Fmoc was totally removed, which was monitored by LCMS. The resulting mixture was diluted with distilled water (10 mL) and lyophilized. The residual off-white solid was purified by reversed phase flash chromatography (0-70% acetonitrile in aq. acetic acid (0.5%)) to give cyclodextrin-linker BL10 (2.1 mg, 36% yield) as a white solid. ESI m/z: 1488.2 (M+H)⁺. ¹H NMR (400 MHz, MeODd₄) δ 5.06 (d, J=3.2 Hz, 1H), 4.94 (br d, J=2.4 Hz, 5H), 4.02-3.84 (m, 1H), 4.03-3.72 (m, 21H), 3.71-3.49 (m, 24H), 3.47-3.34 (m, 9H), 3.48 (br s, 1H), 2.99 (t, J=5.1 Hz, 2H), 2.69-2.61 (m, 4H), 2.47 (t, J=6.0 Hz, 2H), 1.91-1.84 (m, 2H) ppm.

### Example 19: Synthesis of glucose linker BL11

[1040] Glucose linker BL111 was synthesized as described in Scheme 23 and Examples 19A-19F, below.

[chemical structure]

[1041] Compound BL11-1 was synthesized according to Org. Biomol. Chem., 2007, 5(21), 3477-3485.

### Example 19A: 2-[2-(2-{[(2R,3R,4S,5R,6R)-3,4,5-Tris(prop-2-en-1-yloxy)-6-[(prop-2-en-1-yloxy)methyl]oxan-2-yl]oxy}ethoxy)ethoxy]ethan-1-amine (BL11-2)

[chemical structure]

[1043] To a solution of compound BL11-1 (0.60 g, 1.2 mmol) in THF (10 mL) and water (1.5 mL) was added trimethylphosphine (1 M in THF, 1.8 mL, 1.8 mmol) at 0° C., and the reaction mixture was stirred at 0° C. for an hour, which was monitored by TLC (eluted with 25% ethyl acetate in petroleum ether). The resulting mixture was then poured into ice-water (20 mL) and was stirred for 2 minutes. The aqueous mixture was extracted with ethyl acetate (30 mL×3). The combined organic solution was washed with brine (20 mL×3), dried over anhydrous sodium sulfate and concentrated in vacuo to give crude product BL11-2 (0.55 g, 87% yield) as a yellow oil, which was used for the next step without further purification. ESI m/z: 472.3 (M+H)⁺. ¹H NMR (400 MHz, CDCl₃) δ 6.11-5.82 (m, 4H), 5.34-5.22 (m, 4H), 5.22-5.06 (m, 4H), 4.42-3.96 (m, 10H), 3.76-3.58 (m, 9H), 3.55-3.47 (m, 2H), 3.44-3.29 (m, 3H), 3.27-3.16 (m, 1H), 2.96-2.76 (m, 2H) ppm.

### Example 19B: 9H-Fluoren-9-ylmethyl N-{2-[2-(2-{[(2R,3R,4S,5R,6R)-3,4,5-tris(prop-2-en-1-yloxy)-6-[(prop-2-en-1-yloxy)methyl]oxan-2-yl]oxy}ethoxy)ethoxy]ethyl}carbamate (BL11-3)

[chemical structure]

[1045] To a solution of compound BL11-2 (0.50 g, 1.1 mmol) and DIPEA (0.41 g, 3.2 mmol) in DCM (5 mL) was added FmocOSu (0.43 g, 1.3 mmol) in portions under nitrogen over 15 minutes at 0° C. The mixture was stirred at 20° C. for an hour, which was monitored by LCMS. The resulting mixture was poured into water (20 mL) and stirred for 2 minutes. The aqueous mixture was extracted with ethyl acetate (30 mL×3). The combined organic solution was washed with brine (20 mL×3), dried over anhydrous sodium sulfate and concentrated in vacuo. The residue was purified by silica gel flash chromatography (0-50% ethyl acetate in petroleum ether) to give compound BL11-3 (0.55 g, 71% yield) as a light yellow oil. ESI m/z: 716.3 (M+Na)⁺. ¹H NMR (400 MHz, CDCl₃) δ 7.77 (d, J=7.5 Hz, 2H), 7.61 (d, J=7.5 Hz, 2H), 7.44-7.37 (m, 2H), 7.35-7.28 (m, 2H), 6.02-5.83 (m, 4H), 5.42 (br s, 1H), 5.31-5.20 (m, 4H), 5.19-5.09 (m, 4H), 4.40-4.01 (m, 12H), 3.75-3.54 (m, 11H), 3.43-3.30 (m, 5H), 3.25-3.15 (m, 1H) ppm.

### Example 19C: 9H-Fluoren-9-ylmethyl N-{2-[2-(2-{[(2R,3R,4S,5R,6R)-3,4,5-tris({3-[(2-{[(tert-butoxy)carbonyl]amino}ethyl)sulfanyl]propoxy})-6-({3-[(2-{[(tert-butoxy)carbonyl]amino}ethyl)sulfanyl]propoxy}methyl)oxan-2-yl]oxy}ethoxy)ethoxy]ethyl}carbamate (BL11-5)

[chemical structure]

[1047] To a solution of compound BL11-3 (0.20 g, 0.29 mmol) in methanol (8 mL) charged in a quartz flask was added Boc-cysteamine BL11-4 (1.0 g, 5.8 mmol). The reaction mixture was degassed and purged with argon for 30 minutes and was then stirred at 20° C. under UV light irradiation (A=254 nm) under nitrogen protection for 12 hours, which was monitored by LCMS. The resulting mixture was concentrated in vacuo, and the residue was purified by silica gel flash chromatography (0-80% ethyl acetate in petroleum ether) to give compound BL11-5 (0.30 g, 67% yield) as a yellow oil. ESI m/z: 1425.9 (M+Na)⁺. ¹H NMR (400 MHz, CDCl₃) δ 7.77 (d, J=7.5 Hz, 2H), 7.62 (d, J=7.5 Hz, 2H), 7.44-7.38 (m, 2H), 7.35-7.29 (m, 2H), 5.04 (br s, 3H), 4.40 (br d, J=6.8 Hz, 2H), 4.28-4.20 (m, 2H), 4.02-3.47 (m, 20H), 3.41 (br d, J=4.8 Hz, 2H), 3.35-3.15 (m, 11H), 3.13-3.00 (m, 1H), 2.70-2.54 (m, 15H), 1.94-1.75 (m, 7H), 1.45 (s, 36H) ppm.

### Example 19D: 9H-Fluoren-9-ylmethyl N-{2-[2-(2-{[(2R,3R,4S,5R,6R)-3,4,5-tris({3-[(2-aminoethyl)sulfanyl]propoxy})-6-({3-[(2-aminoethyl)sulfanyl]propoxy}methyl)oxan-2-yl]oxy}ethoxy)ethoxy]ethyl}carbamate (BL11-6)

[chemical structure]

[1049] To a solution of compound BL11-5 (0.11 g, 78 μmol) in DCM (1.5 mL) was added TFA (1.7 g, 15 mmol), and the reaction mixture was stirred at 20° C. for an hour until Boc was totally removed, which was monitored by LCMS. The volatiles were removed in vacuo to give crude product BL11-6 (90 mg, 93% yield, TFA salt) as light yellow oil. ESI m/z: 1002.4 (M+H)⁺.

### Example 19E: 9H-Fluoren-9-ylmethyl N-{2-[2-(2-{[(2R,3R,4S,5R,6R)-3,4,5-tris({3-[(2-azidoethyl)sulfanyl]propoxy})-6-({3-[(2-azidoethyl)sulfanyl]propoxy}methyl)oxan-2-yl]oxy}ethoxy)ethoxy]ethyl}carbamate (BL11-7)

[chemical structure]

[1051] To a solution of compound BL11-6 (60 mg, 48 μmol, TFA salt) in methanol (1 mL) and water (0.5 mL) were added successively at 20° C. copper sulfate pentahydrate (0.48 g, 1.9 μmol), triethylamine (39 mg, 0.39 mmol) and a solution of trifluoromethanesulfonyl azide (42 mg, 0.24 mmol) in DCM (5 mL). The reaction mixture was stirred at 20° C. for half an hour. Reaction completion was monitored by LCMS. The resulting mixture was quenched with glycine (0.5 g) and stirred at 20° C. for half an hour. The mixture was filtered and the filtrate was partitioned between DCM (30 mL) and brine (15 mL). The organic solution was dried over anhydrous sodium sulfate and concentrated in vacuo to give compound BL11-7 (50 mg, 84% yield) as a yellow oil, which was used for the next step without further purification. ESI m/z: 1128.4 (M+Na)⁺. ¹H NMR (400 MHz, CDCl₃) δ 7.78 (d, J=7.5 Hz, 2H), 7.62 (d, J=7.2 Hz, 2H), 7.44-7.38 (m, 2H), 7.36-7.30 (m, 2H), 5.46-5.40 (m, 1H), 5.38-5.32 (m, 1H), 4.40 (br d, J=6.8 Hz, 2H), 4.27-4.18 (m, 2H), 4.01-3.35 (m, 31H), 3.23-3.18 (m, 2H), 3.09 (q, J=7.3 Hz, 5H), 2.68-2.59 (m, 8H), 2.26-2.19 (m, 1H), 2.06-1.97 (m, 2H), 1.92-1.81 (m, 8H) ppm.

### Example 19F: 2-[2-(2-{[(2R,3R,4S,5R,6R)-3,4,5-Tris({3-[(2-azidoethyl)sulfanyl]propoxy})-6-({3-[(2-azidoethyl)sulfanyl]propoxy}methyl)oxan-2-yl]oxy}ethoxy)ethoxy]ethan-1-amine (BL11)

[chemical structure]

[1053] To a solution of compound BL11-7 (45 mg, 41 μmol) in DMF (0.2 mL) was added piperidine (35 mg, 0.41 mmol), and the reaction mixture was stirred at 20° C. for 0.2 hour, which was monitored by LCMS. The resulting mixture was concentrated in vacuo and the residue was purified by reversed phase flash chromatography (40-60% acetonitrile in aq. formic acid (0.225%)) to give glucose-linker BL11 (18 mg, 45% yield, formic acid salt) as a yellow oil. ESI m/z: 884.5 (M+H)⁺. ¹H NMR (400 MHz, CDCl₃) δ 8.52 (s, 1H), 4.26 (d, J=7.8 Hz, 1H), 4.06-3.97 (m, 1H), 3.95-3.58 (m, 19H), 3.52-3.44 (m, 8H), 3.31-3.17 (m, 3H), 3.12-3.06 (m, 1H), 3.01 (t, J=4.9 Hz, 2H), 2.78-2.64 (m, 18H), 1.96-1.75 (m, 8H) ppm.

### Example 20: ADC Conjugation

[1054] This example demonstrates a method for site-specific conjugation according to an embodiment of the disclosure, generally, of a payload to an antibody or an antigen-binding fragment thereof. This method includes a two-step process shown in FIG. 2. The first step is microbial transglutaminase (MTG) mediated attachment of Linker 1 (L1-B′), such as bis azido-alkyl substituted amine (BL7) or azide-PEG₃-amine (AL1), to the antibody, wherein an excess of the amine reagent was used to avoid potential cross-linking of antibody chains. The second step attached the alkyne-linked payload linker payload (L2P) to the N₃-tagged conjugate via a strain-promoted azide-alkyne cycloaddition (SPAAC). The number of L2P molecules added to the antibody is dependent on the number of conjugation sites and the number of azide functional groups (n) within L₁ (AL, n=1; BL, n 2). For antibodies with a WT Fc domain that were enzymatically deglycosylated or have an N297D Fc mutation and then azido functionalized with AL or BL linkers, the expected DAR=2 times n times m, where n is the number of azide functional groups B′ on each L1 linker, and m is the number of L2P payloads, respectively. For antibodies with an N297Q Fc mutation then azido functionalized with AL or BL linkers, the expected DAR=4×(n)×(m).

[1055] All parental antibody (Ab), azido-functionalized antibody containing 2, 4 or 8 azido groups (Ab-(N₃)n), final ADCs generated as specific examples and the corresponding linker-payload (L₂P), as well as their ES-MS results and DAR values of the ADCs are summarized in Table 16.

TABLE 16
Antibodies, Antibody-linkers, and ADCs according
to an embodiment of the disclosure

| | | | Modification | | | |
|---|---|---|---|---|---|---|
| Test | Antibody | Site of | | MW | DAR by | ESI-MS |
| Article | Description | Conjugation | AL, BL, LP # | (g/mol) | ESI-MS | (m/z) |
| 1 | Anti-HER2 | | None | NA | NA | 145122 |
| | | | | | | (degly) |
| 2 | Anti-HER2 | Q295 | [AL1]₂ | 218.3 | 2 | 145519 |
| 3 | Anti-HER2 | Q295 | [AL1-LP1]₂ | 1614.8 | 2 | 148330 |
| 4 | Isotype | | None | NA | NA | 145443 |
| 5 | Isotype | Q295 | [AL1]₂ | 218.3 | 2 | 145823 |
| 6 | Isotype | Q295 | [AL1-LP1]₂ | 1614.8 | 2 | 148619 |
| 7 | Anti-HER2 | | None | NA | NA | 145139 |
| 8 | Anti-HER2 | Q295, Q297 | [AL1]₄ | 218.3 | 4 | 145943 |
| 9 | Anti-HER2 | Q295, Q297 | [BL7]₄ | 325.4 | 4 | 146372 |
| 10 | Anti-HER2 | Q295, Q297 | [AL1-LP1]₄ | 1614.8 | 4 | 151544 |
| 11 | Anti-HER2 | Q295, Q297 | [BL7-(LP1)₂]₄ | 3118.4 | 8 | 157557 |
| 12 | Anti-STEAP2 | | None | NA | NA | 144006 |
| 13 | Anti-STEAP2 | Q295, Q297 | [AL1]₄ | 218.3 | 4 | 144787 |
| 14 | Anti-STEAP2 | Q295, Q297 | [BL7]₄ | 325.4 | 4 | 145208 |
| 15 | Anti-STEAP2 | Q295, Q297 | [AL1-LP1]₄ | 1614.8 | 4 | 150364 |
| 16 | Anti-STEAP2 | Q295, Q297 | [BL7-(LP1)₂]₄ | 3118.4 | 8 | 156381 |
| 17 | Isotype Control | | None | NA | NA | 145451 |
| 18 | Isotype Control | Q295, Q297 | [AL1]₄ | 218.3 | 4 | 146245 |
| 19 | Isotype Control | Q295, Q297 | [BL7]₄ | 325.4 | 4 | 146678 |
| 20 | Isotype Control | Q295, Q297 | [AL1-LP1]₄ | 1614.8 | 4 | 151849 |
| 21 | Isotype Control | Q295, Q297 | [BL7-(LP1)₂]₄ | 3118.4 | 8 | 157863 |

ESI-MS should approximate according to the following:
For Azido Functionalized Antibodies (i.e. no LP1); MW = MW_{Ab} + (#Conjugation Sites)(MW_{L1} − 18)
For ADC; MW = MW_{Ab} + (#Conjugation Sites)(MW_{L1} − 18) + (DAR)(MW_{LP1})
MW_{AL1} = 218.3 g/mol, MW_{BL7} = 325.4 g/mol, MW_{LP1} = 1396.5 g/mol

[1056] Table 17, below, provides the structures of ADCs generated using the two-step methods according to the present disclosure.

TABLE 17
structures of ADCs according to the present disclosure

| Test | | Site | | | |
|---|---|---|---|---|---|
| Arti- | | of | Mod./ | | |
| cle | Ab | Conj. | Des. | Structure of Modification | DAR |
| 3 | Anti- HER2 | Q295 | [AL1- LP1]₂ (Azido) | [chemical structure] | 2 |
| 6 | Isotype | Q295 | [AL1- LP1]₂ (Azido) | [chemical structure] | 2 |
| 10 | Anti- HER2 | Q295 Q297 | [AL1- LP1]₄ (Azido) | [chemical structure] | 4 |
| 11 | Anti- HER2 | Q295 Q297 | [BL7- (LP1)₂]₄ (Branch- ed Azido) | [chemical structure] | 8 |
| BIS1 BIS2 | Anti- HER2/ HER2 bi- specific | Q295 | [BL7- (LP1)₂]₄ (Branch- ed Azido) | [chemical structure] | |
| 15 | Anti- STEAP2 | Q295 Q297 | [AL7- LP1]₄ (Azido) | [chemical structure] | 4 |
| 16 | Anti- STEAP2 | Q295 Q297 | [BL7- (LP1)₂]₄ (Branch- ed Azido) | [chemical structure] | 8 |
| 20 | Isotype Control | Q295 Q297 | [AL1- LP1]₄ (Azido) | [chemical structure] | 4 |
| 21 | Isotype Control | Q295 Q297 | [BL7- (LP1)₂]₄ (Branch- ed Azido) | [chemical structure] | 8 |

[1057] Table 18, below, provides the structures of ADCs generated using cysteine conjugation methods for comparison purposes.

TABLE 18
Structures of comparison ADCs

| | | | Site | | |
|---|---|---|---|---|---|
| | | Mod./ | of | | |
| | Ab | Des. | Conj. | Structure of Modification | DAR |
| 22 | Anti- HER2 | GGFG- DxD | Cys | [chemical structure] | 7.4- 8.4 |
| 23 | Iso- type Con- trol | GGFG- DxD | Cys | [chemical structure] | 6.9- 7.5 |

### Example 20A: Step 1: Making a Site-Specific Azido-Functionalized Antibody Drug Conjugate Containing 2, 4 or 8 Azido Groups (See Table 19)

[1058] Anti-HER2 human IgG antibody containing an N297Q mutation or an isotype control antibody was mixed with 150 molar equivalents of azido-PEG3-amine (AL1, MW 218.26 g/mol) or bis azido-alkyl substituted amine (BL7, MW 325.38 g/mL). The resulting solution was mixed with transglutaminase (25U/mL; 1U mTG per mg of antibody, Zedira, Darmstadt, Germany) resulting in a final concentration of the antibody at 1-20 mg/mL. The reaction mixture was incubated at 25-37° C. for 4-24 hours while gently shaking while monitored by ESI-MS. Upon completion, the excess amine and mTG were removed by size exclusion chromatography (SEC) or protein A column chromatography. The conjugate was characterized by UV-Vis, SEC and ESI-MS. The azido linkers attached antibody resulting in an 804 Da or 1232 Da mass increase for the DAR=4 conjugate with AL1 and BL7 respectively. Conjugates monomer purity was >99% by SEC.

### Example 20B: Step 2: Making Site-Specific Conjugates of Table 19 Via 1,3-Cycloaddition (“Click”) Reactions Between Azido-Functionalized Antibodies and Alkyne Containing Linker-Payloads

[1059] A site-specific antibody drug conjugate was prepared by incubating azido-functionalized antibody (1-20 mg/mL) in PBS (pH 7.4) with >6 molar equivalents of a linker-payload dissolved in an organic solvent such as DMSO or DMA (10 mg/mL) to have the reaction mixture containing 5-15% organic solvent (v/v), at 25-37° C. for 1-48 hours while gently shaking. The reaction was monitored by ESI-MS. Upon completion, the excess amount of linker-payload and protein aggregates were removed by size exclusion chromatography (SEC). The purified conjugate was concentrated, sterile filtered and characterized by UV-Vis, SEC and ESI-MS. Conjugates monomer purity was >99% by SEC.

### Example 20C: Preparation of Anti-HER2 Ab-[AL1-LP1]₄ and Anti-HER2 Ab-[(BL7)-(LP1)₂]₄

[1060] In a specific example shown in FIG. 4A, aglycosylated anti-HER2 human IgG antibody containing an N297Q mutation was mixed with 150 molar equivalents of a bis azido-alkyl substituted amine (BL7, MW 325.38 g/moL). The resulting solution was mixed with microbial transglutaminase (25 U/mL; 1U mTG per mg of antibody, Zedira, Darmstadt, Germany) resulting in a final concentration of the antibody at 8.6 mg/mL. The reaction mixture was incubated at 37° C. for 22 hours while gently shaking while monitored by ESI-MS. Upon completion, the excess amine and mTG were removed by size exclusion chromatography (SEC). The conjugate was characterized by UV-Vis, SEC and ESI-MS. The azido linkers attached antibody resulting in a 1232 Da mass increase for the DAR=4 conjugate. The site-specific antibody azido conjugate (8.6 mg/mL) in PBS (pH 7.4) was mixed with 20 molar equivalents of linker-payload (LP1) in 10 mg/mL of DMA to have the reaction mixture containing 12% organic solvent (v/v), and the solution was set at 32° C. for 36 hours while gently shaking. The reaction was monitored by ESI-MS. Upon completion, the excess amount of linker-payload and protein aggregates were removed by size exclusion chromatography (SEC). The purified conjugate was concentrated, sterile filtered and characterized by UV-Vis, SEC and ESI-MS. Conjugates monomer purity was 99.8% by SEC. The drug attached antibody resulted in a 11185 Da mass increase for the DAR=8 conjugate.

### Example 20D: Preparation of Anti-HER2/HER2 Bispecific Antibody-Drug Conjugates BIS1 and BIS2-Ab-[(BL7)-(LP1)₂]4

[1061] Two antibody-drug conjugates comprising an anti-HER2 bispecific antibody, where the antibody binds two distinct epitopes of HER2 were synthesized under conditions similarly described in Examples 18A-18C above to form BIS1 and BIS2 (Table 20). The two bispecific antibodies (Anti-HER2/HER2 Ab1 and Anti-HER2/HER2 Ab2) each have two binding domains binding separate epitopes of HER2. In this example, the antibodies were enzymatically deglycosylated to effect site specific azido functionalization at the two heavy chain Fc Q295 glutamine residues with the BL7 linker according to the procedure as described above. The observed DAR (based on cytotoxic agent) for the two bispecific antibody-drug conjugates BIS1 and BIS2 are provided in Table 20.

TABLE 20
Antibody Drug Conjugate DARs

| | | DAR |
|---|---|---|
| | ADC | (by ESI-MS) |
| BIS1 | Anti-HER2/HER2 Ab1-[(BL7)-(LP1)₂]₄ | 5.2 |
| BIS2 | Anti-HER2/HER2 Ab2-[(BL7)-(LP1)₂]₄ | 3.8 |

### Example 21: ADC Conjugation: Three Approaches

[1062] The site-specific ADC conjugations on antibody Q295/297 sites to generate DAR4 to DAR24 ADCs are depicted in FIG. 5 and on antibody Q295 sites to generate DAR2 to DAR12 ADCs are depicted in FIG. 6. The present disclosure depicts three exemplary approaches to attach branched linker-payloads to antibody Q295/297 sites.

[1063] Approaches I and II include a two-step process for the antibody-drug conjugations. The first step is microbial transglutaminase (MTG) mediated attachment of a small molecular amine, e.g., AL1 or BL2, to the mAb-Q sites, wherein an excess of the amine reagent is used to avoid potential cross-linking of antibody chains (WO2017/147542, incorporated by reference herein in its entirety). The second step is attaching an alkyne-linked linker payload (L₂P) to the N₃-tagged conjugate via, e.g., a strain-promoted azide-alkyne cycloaddition (SPAAC, aka copper-free click chemistry). Where the reactive group (RG) is a DIBAC or COT moiety, the conjugation is carried out with an azido functionalized antibody via a [2+3] cycloaddition. This process provides the site-specific and stoichiometric conjugates. The number of L₂P molecules added to the antibody is dependent on the number of conjugation sites and the number of azide functional groups (n) within L₁ (e.g., for AL, n=1; for BL, n 2).

[1064] Approach I is to conjugate a small molecular amine linker L1 (e.g., AL1) to the antibody Q295/297 sites to generate antibody-azido tag (Ab-N₃), which is then covalently reacted (e.g., via the “click” cycloaddition) with an alkyne-tethered linear linker-payload (LL2P) to generate 4DAR ADCs (method A in FIG. 5) and with an alkyne tethered branched linker-payload (BL2P) to generate 8DAR ADCs (method B in FIG. 5).

[1065] Approach II is to conjugate a small molecular branched azido-amine (e.g., BL2) to the antibody Q295/297 sites to generate antibody branched-azido tag (Ab-branch-2N₃), which is then covalently reacted (e.g., via the “click” cycloaddition) with a linear linker-Payload to generate 8DAR ADCs (method C in FIG. 5) and with an alkyne tethered branched linker-2 Payload to generate 16DAR ADCs or a branched tethered-3 Payload to generate 24DAR ADCs (method D in FIG. 5). Similarly, the site-specific ADC conjugations on antibody Q295 sites with the linear or branched linker-Payload could generate DAR2 to DAR12 ADCs (FIG. 6).

[1066] In the conjugations of Approach III, the MTG mediated attachment of an amine-branched linker-payload to the antibody Q295/297 sites was achieved using ≥20 molar equivalents of the amine reagents in a single step MTG-mediated reaction.

[1067] For antibodies with a WT Fc domain that were enzymatically deglycosylated or have an N297D Fc mutation and then azido functionalized with AL or BL linkers, the expected DAR per azido-tag on 2 Fc=2n. For antibodies with an N297Q Fc mutation which were azido-functionalized with AL or BL linkers, the expected DAR per per azido-tag on 2 Fc=4n. For antibodies conjugated with each linker-Payload having m×payload (Pₘ), the expected ADC-DAR=(2n×m) for N297D mutated antibodies (FIG. 6) and (4n×m) for N297Q mutated antibodies (FIG. 5).

[1068] All ADCs conjugated via 2-steps conjugations (methods A, B, C, D in FIG. 5) were summarized in Table 21 and the ADCs conjugated via 1-step conjugations (methods E in FIG. 5) were summarized in Table 22.

[1069] Generic procedures for making site-specific conjugates in two steps

### Example 21A: Step 1: Making a Site-Specific Azido-Functionalized Antibody Drug Conjugate Containing 2, 4 or 8 Azido Groups

[1070] Aglycosylated human antibody IgG (IgG1, IgG4, etc.) containing an N297Q mutation or N297D mutation in BupH buffer (pH7.4) was mixed with >=150 molar equivalents of azido-PEG3-amine (AL1) or bis azido-alkyl substituted amine (BL2). The resulting solution was mixed with transglutaminase (25U/mL; 1U mTG per mg of antibody, Zedira, Darmstadt, Germany; or 10U/mL; 5.5U MTG per mg of antibody, Modernist Pantry-ACTIVA TI contains Maltodextrin from Ajinomoto, Japan) resulting in a final concentration of the antibody at 0.5-20 mg/mL. The reaction mixture was incubated at 25-37° C. for 24 hours while gently shaking while monitored by ESI-MS. Upon completion, the excess amine and mTG were removed by size exclusion chromatography (SEC) or protein A column chromatography. The conjugate was characterized by UV-Vis, SEC and ESI-MS. The azido linkers attached to the antibody resulted in an 804 Da or 1232 Da mass increase for the 4DAR conjugates with AL1 and BL2, respectively, and in a 2768 Da increase for the 8DAR antibody-BL2-(azide)₈ conjugate. Conjugates' monomer purity was >99% by SEC.

### Example 21B: Step 2: Making Site-Specific Conjugates Via [2+3] Click Reactions Between Azido-Functionalized Antibodies and an Alkyne Containing Linker-Payload

[1071] A site-specific antibody drug conjugate with a human IgG (IgG1, IgG4, etc) was prepared by the [2+3] azide-alkyne “click” reaction between the azido-functionalized antibody and an alkyne-functionalized linker-payload. The azido-functionalized antibody (1-20 mg/mL) in PBS (pH7.4) was incubated with >6 molar equivalents of a linker-payload (LP) dissolved in an organic solvent such as DMSO or DMA (10 mg/mL) to have the reaction mixture containing 5-15% organic solvent (v/v) at 25-37° C. for 1-48 hours while gently shaking. The reaction was monitored by ESI-MS. Upon completion, the excess amount of LP and organic solvent were removed by desalting column with BupH (pH 7.4) and protein aggregates (if any) were removed by size exclusion chromatography (SEC). The purified conjugate was concentrated, sterile filtered and characterized by UV-Vis, SEC and ESI-MS. Conjugates' monomer purity was >99% by SEC.

### Example 21C: A Representative 8DAR ADC from Approach I is Exemplified with Ab-LP39 ADC (FIG. 7A)

[1072] The aglycosylated anti-Her2 human IgG antibody containing an N297Q mutation was mixed with >200 molar equivalents of a azido-dPEG3-amine (AL1, MW 218.26 g/moL). The resulting solution was mixed with microbial transglutaminase (10U/mL; 5,5U mTG per mg of antibody, Modernist Pantry-ACTIVA TI contains Maltodextrin from Ajinomoto, Japan) resulting in a final concentration of the antibody at 5 mg/mL. The reaction mixture was incubated at 37° C. for 24 hours while gently shaking while monitored by ESI-MS. Upon completion, the excess amine and mTG were removed by size exclusion chromatography (SEC). The conjugate was characterized by UV-Vis, SEC and ESI-MS. The azido linkers attached to the antibody resulted in a 808 Da mass increase, indicating that 4 AL1s with 4 azido tags were conjugated to the antibody (Ab-4AL1). This site-specific antibody azido conjugate (2.1 mg/mL) in PBS (pH7.4) was mixed with 15 molar equivalents of linker-payload (LP39) in 2 mM of DMSO to have the reaction mixture containing 5% organic solvent (v/v), and the solution was set at 32° C. for 36 hours while gently shaking. The reaction was monitored by ESI-MS. Upon completion, the excess amount of linker-payload and protein aggregates were removed by size exclusion chromatography (SEC). The purified conjugate was concentrated, sterile filtered and characterized by UV-Vis, SEC and ESI-MS. Conjugate's monomer purity was 99.8% by SEC. The drug attached to the antibody resulted in a 11003 Da mass increase for the DAR8 conjugate, indicating that 8 LPs were conjugated to the antibody.

### Example 21D: A representative 8DAR ADC from Approach I is exemplified with Ab-LP22 ADC (FIG. 7B)

[1073] The aglycosylated anti-Her2 human IgG antibody containing an N297Q mutation was mixed with >200 molar equivalents of BL2 (MW=708.8 g/mol). The resulting solution was mixed with microbial transglutaminase (10U/mL; 5.5U mTG per mg of antibody, Modernist Pantry-ACTIVA TI contains Maltodextrin from Ajinomoto, Japan) resulting in a final concentration of the antibody at 5 mg/mL. The reaction mixture was incubated at 37° C. for 24 hours while gently shaking. Upon the completion, the excess amine and MTGase were removed by size exclusion chromatography (SEC). The conjugate was characterized by UV-Vis, SDS-PAGE, SEC and ESI-MS. Conjugate's monomer purity was 96.11% by SEC. The azido linkers attached to the antibody resulted in a 2768 Da mass increase, indicating 4 BL2 was conjugated to the antibody (Ab-2BL2) with 8 azido tags. The site-specific antibody azido conjugate (1.492 mg/mL) in BupH (pH7.4) was mixed with 15 molar equivalents of linker-payload (LP22) in 2 mM of DMSO to have the reaction mixture containing 5% organic solvent (v/v), and the solution was set at 25° C. for 72 hours while gently shaking. The reaction was monitored by SDS-PAGE. Upon completion, the excess amount of linker-payload was removed by desalting column with BupH (pH 7.4). The drug attached to the antibody conjugate showed a 12200 Da mass increase for the DAR8 conjugate, indicating that 8 LPs were conjugated to the antibody.

[1074] An exemplary branched azide reagent BL12 used in the conjugation in Approach II is depicted below.

[chemical structure]

### Example 21E: Generic Procedures for Making Site-Specific Conjugates in One Step

[1075] Aglycosylated human antibody IgG (IgG1, IgG4, etc.) in BupH buffer (pH7.4) is mixed with 15-30 molar equivalents of amino-linker-payload. The resulting solution is mixed with MTG (Modernist Pantry-ACTIVA TI contains Maltodextrin from Ajinomoto, Japan) (10U/mL; 5.5U MTG per mg of antibody) resulting in a final concentration of the antibody at 0.5-5 mg/mL, and the solution was then incubated at 37° C. for 24h while gently shaking. Upon reaction completion, the excess amine and MTG are removed by Size Exclusion Chromatography (SEC) to generate the directly conjugated Linker-Payload ADC. This product is concentrated by ultra centrifugation and characterized by SDS-PAGE, SEC and LC-MS. The MS results of the ADC included an additional mass increase of 4×LP conjugate, indicating 4DAR ADC, or an additional mass increase of 8×LP conjugate, indicating 8DAR ADC.

### Example 21F: A Representative 4DAR ADC from Approach III Exemplified by Ab-LP21 ADC, which was Conjugated from One Step Conjugation of an Antibody with a with Linear-Linker-Payload (FIG. 7C)

[1076] In a specific example, the aglycosylated antibody (1 mg) in 0.5 mL BupH (pH 7.4) was treated with 30 molar equivalents of LP08 (conc. 20 mM in DMSO). The resulting solution is mixed with MTG (Modernist Pantry-ACTIVA TI contains Maltodextrin from Ajinomoto, Japan) (10U/mL; 5.5U MTG per mg of antibody) resulting in a final concentration of the antibody at 5 mg/mL, and the solution was then incubated for 24 hours at 37° C. while gently shaking. Upon reaction completion, the excess linker payload (LP) was removed by Size Exclusion Chromatography (SEC, Superdex® 200 Increase 10/300 GL). This product is concentrated by ultra-centrifugation and characterized by SDS-PAGE, SEC and LC-MS. Conjugate's monomer purity was 98.8% by SEC. The amino-linker-payload added to four sites of the antibody resulting in a 5380 Da increase for the 4DAR antibody-LP conjugate.

### Example 21G: A Representative 8DAR ADC from Approach III Exemplified with Ab-LP27 ADC (FIG. 7C), which was Conjugated from One Step Conjugation of an Antibody with a Branched Linear-Linker-Payload

[1077] Using the same method described for the one step conjugation for making 4DAR ADC (Example 21F), an amino-branched linker-payload (LP27) was conjugated to four sites of the antibody, resulting in a 10187.2 Da increase for the 8DAR conjugate.

TABLE 21
ADCs conjugated from 2-steps (methods A, B, C, D in FIG.
5) for targeting Her2, FGFR2, and non-binding control

| | | ADC | | |
|---|---|---|---|---|
| Linker-payload | | | | SKBR3 |
| LP# | Name | ADC code # | DAR | EC₅₀ (nM) |
| | None | Anti-Her2 | | NA |
| | None | Anti-Her2-AL1 | | NA |
| | None | Anti-Her2-BL2 | | NA |
| LP9 | COT-GGFG-NHCH2-Dxd | Anti-Her2-AL1- | 4.00 | 0.61 |
| | | LP9 | | |
| LP4 | DIBAC-GGFG-NHCH2-Dxd | Anti-Her2-AL1- | 3.68 | 0.60 |
| | | LP4 | | |
| LP3 | COT-GGGG-NHCH2-Dxd | Anti-Her2-AL1- | — | — |
| | | LP3 | | |
| LP1 | COT-PEG4-vcPAB-G-NHCH2-Dxd | Anti-Her2-AL1- | 4.00 | 0.38 |
| | | LP1 | | |
| LP1 | COT-PEG4-vcPAB-G-NHCH2-Dxd | Control-AL1-LP1 | 4.00 | 285.97 |
| LP1 | COT-PEG4-vcPAB-G-NHCH2-Dxd | Anti-Her2-BL2- | 8.00 | 0.38 |
| | | LP1 | | |
| LP2 | DIBAC-PEG4-vcPAB-G-NHCH2-Dxd | Anti-Her2-AL1- | 4.00 | 0.40 |
| | | LP2 | | |
| LP2 | DIBAC-PEG4-vcPAB-G-NHCH2-Dxd | Control -AL1-LP2 | 4.00 | >500.00 |
| LP20 | COT-PEG4-^{D}EvcPAB-G-NHCH2-Dxd | Anti-Her2-AL1- | 4.00 | 0.36 |
| | | LP20 | | |
| LP20 | COT-PEG4-^{D}EvcPAB-G-NHCH2-Dxd | Control -AL1- | 4.00 | 182.57 |
| | | LP20 | | |
| LP22 | COT-PEG4-^{L}EvcPAB-G-NHCH2-Dxd | Anti-Her2-AL1- | 3.97 | 0.05 |
| | | LP22 | | |
| LP22 | COT-PEG4-^{L}EvcPAB-G-NHCH2-Dxd | Control -AL1- | 4.00 | >266.00 |
| | | LP22 | | |
| LP22 | COT-PEG4-^{L}EvcPAB-G-NHCH2-Dxd | Anti-Her2-BL2- | 8.00 | 0.42 |
| | | LP22 | | |
| LP10 | COT-PAB(GLCA)-G-NHCH2-Dxd | Anti-Her2-AL1- | 4.00 | 0.35 |
| | | LP10 | | |
| LP11 | COT-PAB(GLC)-G-NHCH2-Dxd | Anti-Her2-AL1- | 4.00 | 0.61 |
| | | LP11 | | |
| LP12 | COT-PAB(GLCA)-GG-NHCH2-Dxd | Anti-Her2-AL1- | 4.00 | 0.30 |
| | | LP12 | | |
| LP23 | COT-PEG4-CO-B1-(LP1)(LP2) | Anti-Her2-AL1- | 7.22 | 0.90 |
| | | LP23 | | |
| LP23 | COT-PEG4-CO-B1-(LP1)(LP2) | Control -AL1- | 6.74 | >500.00 |
| | | LP23 | | |
| LP24 | COT-B2-[NH-PEG2-vcPAB-G-NHCH2- | Anti-Her2-AL1- | 4.24 | 0.36 |
| | Dxd]2 | LP24 | | |
| LP24 | COT-B2-[NH-PEG2-vcPAB-G-NHCH2- | Control -AL1- | 5.86 | 739.11 |
| | Dxd]2 | LP24 | | |
| LP25 | COT-B2-[NH-PEG2-^{D}EvcPAB-G-NHCH2- | Anti-Her2-AL1- | 8.00 | 0.25 |
| | Dxd]2 | LP25 | | |
| LP26 | DIBAC-suc-B2-[NH-PEG4-vcPAB-G- | Anti-Her2-AL1- | 8.00 | 0.44 |
| | NHCH2-Dxd]2 | LP26 | | |
| LP28 | COT-B3-[NH-PEG2-^{D}EvcPAB-G-NHCH2- | Anti-Her2-AL1- | 8.00 | 0.36 |
| | Dxd]2 | LP28 | | |
| LP28 | COT-B3-[NH-PEG2-^{D}EvcPAB-G-NHCH2- | Control -AL1- | 7.18 | 504.39 |
| | Dxd]2 | LP28 | | |
| LP28 | COT-B3-[NH-PEG2-^{D}EvcPAB-G-NHCH2- | Anti-Her2-BL2- | 11.21 | 0.26 |
| | Dxd]2 | LP28 | | |
| LP30 | DIBAC-suc-B3-[NH-PEG2-^{D}EvcPAB-G- | Anti-Her2-AL1- | 8.00 | 0.50 |
| | NHCH2-Dxd]2 | LP30 | | |
| LP32 | COT-B3-[NH-PEG2-^{L}EvcPAB-G-NHCH2- | Anti-Her2-AL1- | 6.95 | 0.19 |
| | Dxd]2 | LP32 | | |
| LP32 | COT-B3-[NH-PEG2-^{L}EvcPAB-G-NHCH2- | Anti-Her2-BL2- | 11.55 | 0.51 |
| | Dxd]2 | LP32 | | |
| LP34 | DIBAC-suc-B3-[NH-PEG2-^{L}EvcPAB-G- | Anti-Her2-AL1- | 8.00 | 0.40 |
| | NHCH2-Dxd]2 | LP34 | | |
| LP35 | COT-B3-[NH-PEG2-GGFG-NHCH2- | Anti-Her2-AL1- | | |
| | Dxd]2 | LP35 | | |
| LP36 | COT-B4-[NH-PEG2-^{D}EVCPAB-G- | Anti-Her2-AL1- | 8.00 | 0.19 |
| | NHCH2-Dxd]2 | LP36 | | |
| LP37 | COT-B4-[NH-PEG2-^{L}EVCPAB-G- | Anti-Her2-AL1- | | |
| | NHCH2-Dxd]2 | LP37 | | |
| LP38 | COT-PEG2-B4-[NH-PEG2-^{L}EVCPAB-G- | Anti-Her2-AL1- | 7.23 | 0.46 |
| | NHCH2-Dxd]2 | LP38 | | |
| LP38 | COT-PEG2-B4-[NH-PEG2-^{L}EVCPAB-G- | Anti-Her2-BL2- | 14.16 | 0.36 |
| | NHCH2-Dxd]2 | LP38 | | |
| LP39 | COT-PEG2-B4-[NH-LEVCPAB-G- | Anti-Her2-AL1- | 8.00 | 0.72 |
| | NHCH2-Dxd]2 | LP39 | | |
| LP39 | COT-PEG2-B4-[NH-LEVCPAB-G- | Anti-Her2-BL2- | 15.80 | 0.39 |
| | NHCH2-Dxd]2 | LP39 | | |
| LP41 | COT-PEG2-B5-[NH-PEG2-LEVCPAB-G- | Anti-Her2-AL1- | | |
| | NHCH2-Dxd]3 | LP41 | | |
| LP41 | COT-PEG2-B5-[NH-PEG2-LEVCPAB-G- | Anti-Her2-BL2- | | |
| | NHCH2-Dxd]3 | LP41 | | |
| | None | FGFR2b-1-BL12 | | |
| LP1 | | FGFR2b-1-BL12- | 7.8 | |
| | | LP1 | | |
| LP1 | | FGFR2b-1-AL1- | 4 | |
| | | LP1 | | |
| LP35 | | FGFR2b-1-AL1- | 7.8 | |
| | | LP35 | | |
| LP32 | | FGFR2b-1-AL1- | 7.4 | |
| | | LP32 | | |
| LP39 | | FGFR2b-1-AL1- | 7.5 | |
| | | LP39 | | |
| LP38 | | FGFR2b-1-AL1- | 7.2 | |
| | | LP38 | | |
| LP2 | | FGFR2b-1-BL12- | | |
| | | LP2 | | |
| LP1 | | Control-AL1-LP1 | 4 | |
| LP35 | | Control-AL1- | 7.7 | |
| | | LP35 | | |
| LP32 | | Control-AL1- | 7.3 | |
| | | LP32 | | |
| LP39 | | Control-AL1- | 7.6 | |
| | | LP39 | | |
| LP38 | | Control-AL1- | 7.2 | |
| | | LP38 | | |

TABLE 22
ADCs conjugated from 1-step (method E in FIG. 5)

| Linker-payload | | ADC | | SKBR3 |
|---|---|---|---|---|
| LP# | Name | ADC Code # | DAR | EC₅₀ (nM) |
| LP16 | NH2-PEG4-vcPAB-G-NHCH2-Dxd | Anti-HER2-LP16 | | |
| LP21 | NH2-PEG4-^{L}EvcPAB-G-NHCH2- | Anti-HER2-LP21 | 3.83 | 0.26 |
| | Dxd | | | |
| LP27 | NH2-B3-[NH-PEG2-vcPAB-G- | Anti-HER2-LP27 | | |
| | NHCH2-Dxd]2 | | | |
| LP31 | NH2-B3-[NH-PEG2-^{L}EvcPAB-G- | Anti-HER2-LP31 | | |
| | NHCH2-Dxd]2 | | | |
| qLP18 | NH2-PEG3-TCOT-PEG4-vcPAB- | Anti-HER2- | | |
| | Gly-NHCH2-Dxd | qLP18 | | |

### Example 21H: A Representative Procedure for Step 1: Making a Site-Specific Azido-Functionalized Antibody Drug Conjugate Containing 8 Azido Groups Using Branched (EL) Linkers (Table 23)

[1078] Anti-Her2 human IgG antibody containing an N297Q mutation or isotype control antibody was mixed with 20-100 molar equivalents of bis azido-alkyl substituted amine (BL2, MW 708.82 g/mL or BL12, MW 550.66). The resulting solution was mixed with transglutaminase (1U mTG per mg of antibody, Millipore-Sigma) resulting in a final concentration of the antibody at 1-20 mg/mL. The reaction mixture was incubated at 25-37° C. for 4-24 hours while gently shaking while monitored by ESI-MS. Upon completion, the excess amine and mTG were removed by size exclusion chromatography (SEC) or protein A column chromatography. The conjugate was characterized by UV-Vis, SEC and ESI-MS. The azido linkers attached to the antibody resulted in a 2777 Da or 2145 Da mass increase for the DAR4 conjugate with BL2 and BL12 respectively. Conjugates' monomer purity was >99% by SEC.

### Example 21I: A Representative Procedure for Step 2: Making a Site-Specific Azido-Functionalized Antibody Drug Conjugate Containing 8 Azido Groups Using Branched (BL) Linkers Via [2+3] Click Reactions Between Azido-Functionalized Antibodies and an Alkyne Containing Linker-Payload (Table 23)

[1079] A site-specific antibody drug conjugate was prepared by incubating an azido-functionalized antibody (1-20 mg/mL) in PBS (pH7.4) with 10-20 molar equivalents of a linker-payload dissolved in an organic solvent such as DMSO or DMA (10 mg/mL) to have the reaction mixture containing 5-15% organic solvent (v/v), at 25-37° C. for 1-48 hours while gently shaking. The reaction was monitored by ESI-MS. Upon completion, the excess linker-payload and protein aggregates were removed by size exclusion chromatography (SEC). The purified conjugate was concentrated, sterile filtered and characterized by UV-Vis, SEC and ESI-MS. Conjugate's monomer purity was >99% by SEC.

### Example 21J: Synthesis of Anti-HER2 ADCs

[1080] In a specific example, aglycosylated anti-Her2 human IgG antibody containing an N297Q mutation was mixed with 82 molar equivalents of a bis azido-alkyl substituted amine (BL2, MW 708.82 g/mL). The resulting solution was mixed with microbial transglutaminase (1U mTG per mg of antibody, Millipore-Sigma) resulting in a final concentration of the antibody at 7.9 mg/mL. The reaction mixture was incubated at 37° C. for 30 hours while gently shaking while monitored by ESI-MS. Upon completion, the excess amine and mTG were removed by size exclusion chromatography (SEC). The conjugate was characterized by UV-Vis, SEC and ESI-MS. The azido linkers attached to the antibody resulted in a 2777 Da mass increase for the DAR4 conjugate.

[1081] The site-specific antibody azido conjugate (2.3 mg/mL) in PBS (pH7.4) was mixed with 13 molar equivalents of linker-payload (LP1) in 10 mg/mL of DMA to have the reaction mixture containing 12% organic solvent (v/v), and the solution was set at 26° C. for 27 hours while gently shaking. The reaction was monitored by ESI-MS. Upon completion, the excess linker-payload and protein aggregates were removed by size exclusion chromatography (SEC). The purified conjugate was concentrated, sterile filtered and characterized by UV-Vis, SEC and ESI-MS. Conjugates monomer purity was 99.9% by SEC. The drug attached to the antibody resulted in a 11175 Da mass increase for the DAR8 conjugate.

TABLE 23
List of mAb, Azido-Ab conjugate, and ADC

| | | | Modification | | | |
|---|---|---|---|---|---|---|
| | Antibody | Site of | | MW | DAR by | ESI-MS |
| | Description | Conjugation | AL, BL, LP # | (g/mol) | ESI-MS | (m/z) |
| 1 | Anti-HER2 | Q295 | None | NA | NA | 145122 |
| | | | | | | (degly) |
| 2 | Anti-HER2 | Q295 | [AL1]₂ | 218.3 | 2 | 145519 |
| 3 | Anti-HER2 | Q295 | [AL1-LP1]₂ | 1614.8 | 1.8 | 148330 |
| 4 | Isotype | Q295 | None | NA | NA | 145443 |
| 5 | Isotype | Q295 | [AL1]₂ | 218.3 | 2 | 145823 |
| 6 | Isotype | Q295 | [AL1-LP1]₂ | 1614.8 | 2 | 148619 |
| 7 | Anti-HER2 | Q295 | None | NA | NA | 145139 |
| 8 | Anti-HER2 | Q295, | [AL1]₄ | 218.3 | 4 | 145943 |
| | | Q297 | | | | |
| 9 | Anti-HER2 | Q295, | [BL7]₄ | 325.4 | 4 | 146372 |
| | | Q297 | | | | |
| 10 | Anti-HER2 | Q295, | [AL1-LP1]₄ | 1614.8 | 4 | 151544 |
| | | Q297 | | | | |
| 11 | Anti-HER2 | Q295, | [BL7-(LP1)₂]₄ | 3118.4 | 8 | 157557 |
| | | Q297 | | | | |
| 12 | Anti- | Q295, | None | NA | NA | 144006 |
| | STEAP2 | Q297 | | | | |
| 13 | Anti- | Q295, | [AL1]₄ | 218.3 | 4 | 144787 |
| | STEAP2 | Q297 | | | | |
| 14 | Anti- | Q295, | [BL7]₄ | 325.4 | 4 | 145208 |
| | STEAP2 | Q297 | | | | |
| 15 | Anti- | Q295, | [AL1-LP1]₄ | 1614.8 | 4 | 150364 |
| | STEAP2 | Q297 | | | | |
| 16 | Anti- | Q295, | [BL7-(LP1)₂]₄ | 3118.4 | 8 | 156381 |
| | STEAP2 | Q297 | | | | |
| 17 | Isotype | Q295, | None | NA | NA | 145451 |
| | Control | Q297 | | | | |
| 18 | Isotype | Q295, | [AL1]₄ | 218.3 | 4 | 146245 |
| | Control | Q297 | | | | |
| 19 | Isotype | Q295, | [BL7]₄ | 325.4 | 4 | 146678 |
| | Control | Q297 | | | | |
| 20 | Isotype | Q295, | [AL1-LP1]₄ | 1614.8 | 4 | 151849 |
| | Control | Q297 | | | | |
| 21 | Isotype | Q295, | [BL7-(LP1)₂]₄ | 3118.4 | 8 | 157863 |
| | Control | Q297 | | | | |
| 22 | Anti-HER2 | Q295, | [BL2]₄ | 708.8 | 3.8 | 147915 |
| | | Q297 | | | | |
| 23 | Anti-HER2 | Q295, | [BL2-(LP1)₂]₄ | 3488.8 | 7.5 | 147918 |
| | | Q297 | | | | |
| 24 | Anti-HER2 | Q295, | [BL12]₄ | 550.7 | 4 | 147282 |
| | | Q297 | | | | |
| 25 | Anti-HER2 | Q295, | [BL12-(LP1)₂]₄ | 3329 | 8 | 158453 |
| | | Q297 | | | | |
| 26 | Isotype | Q295, | [BL2]₄ | 708.8 | 3.8 | 148235 |
| | Control | Q297 | | | | |
| 27 | Isotype | Q295, | [BL2-(LP1)₂]₄ | 3483.5 | 7.1 | 159398 |
| | Control | Q297 | | | | |
| 28 | Isotype | Q295, | [BL12]₄ | 550.7 | 4 | 147593 |
| | Control | Q297 | | | | |
| 29 | Isotype | Q295, | [BL12-(LP1)₂]₄ | 3324.5 | 8 | 158762 |
| | Control | Q297 | | | | |

### Example 22: Characterization of ADCs

### Example 22A: SDS-PAGE for Analysis of ADC Integrity and Purity

[1082] In one method, SDS-PAGE running conditions include non-reduced and reduced samples (1-2 μg) along with Precision Plus Protein Dual Color Standards (Bio-rad, 500 μl, Cat #1610374) are loaded per lane in (1.0 mm×10 well) Novex 4-20% No Tris-Glycine Gel and is run at 180V, 300 mA, for 80 minutes. A non-reduced sample is prepared using NuPAGE® LDS Sample Buffer (4×) (Thermo Fisher Scientific, Cat #1887691) and the reduced sample are prepared with SDS sample buffer (4×) containing 10% sample reducing agent (10×) (Thermo Fisher Scientific, Cat #1769410).

[1083] Molecular weights of the antibodies and ADCs on SDS-PAGE are determined under non-reducing and reducing conditions. The mass shifts may not be obvious under non-reducing conditions due to relatively small percentages of mass changes. However, the masses of the heavy chains are increased from the naked antibodies to the azido-functionalized antibodies, and further to the ADC conjugates.

### Example 22B: Size Exclusion Chromatography (SEC) for ADC Analysis and Purification

[1084] To determine the purity of antibody drug conjugates, size exclusion chromatography is performed. Analytical SEC experiments are run using a Thermo UltiMate™ 3000 instrument, on a XBridge Protein BEH SEC Column (Waters, 200 Å, 3.5 μm, 7.8 mm×300 mm), and each sample (30-40 μg, 20 μL) are run at flow rate of 0.5 mL/min using PBS pH 7.4 with 15% 2-propanol and monitored at λ280 nm using Thermo DAD-3000 RS Rapid Separation Diode Array Detector.

[1085] ADCs are purified by Size Exclusion Chromatography (SEC) and concentrated by using ultra centrifugation. To separate the antibody drug conjugates from the reaction mixture, preparative SEC purifications are performed using the ÄKTA instrument from GE Healthcare, on a Superdex® 200 increase 10/300 GL (1.0×30 cm) column, at the flow rate of 0.6 mL/min eluting with BupH at pH 7.4, and monitored at λ280 nm. To concentrate the product Amicon® Ultra-4 Centrifugal Filters (Ultracel-10K) are used in Allegra x-12r centrifuge and the solution is stirred after each concentration to avoid high aggregation.

### Example 22C: RP-HPLC for ADC Analysis

[1086] The intact mass for an ADC samples by RP-HPLC was performed to determine whether the LPs have been fully conjugated and also used to calculate the average DAR.

[1087] Each sample was treated with Dithiothreitol (DTT, 0.5M) and then incubated at 37° C. for 30 min prior to the RP-HPLC analysis. The RP-HPLC was performed using a Thermo UltiMate™ 3000 instrument, on a XBridge Protein BEH C4 column (300 Å, 2.5 μm, 4.6×100 mm; Cat No. 186009137), and the column oven was heated to 65° C. Each testing sample (10-20 μg, 10 μL) was loaded and run at the flow rate of 1 mL/min using different gradients of Mobile Phase A (100% ddH2O with 0.1% TFA) and Mobile Phase B (80% ACN, 20% IPA with 0.1% TFA) shown in Table 24 below and monitored at λ280 nm using Thermo DAD-3000 RS Rapid Separation Diode Array Detector

TABLE 24
RP-HPLC Gradients for ADC analysis

| Time | Flow rate | | |
|---|---|---|---|
| (min) | (ml/min) | A % | B % |
| 0.00 | 1.00 | 80 | 20 |
| 15.00 | 1.00 | 50 | 50 |
| 16.00 | 1.00 | 5 | 95 |
| 18.00 | 1.00 | 5 | 95 |
| 18.10 | 1.00 | 80 | 20 |
| 24.00 | 1.00 | 80 | 20 |

### Example 22D: LC-ESI-MS for Intact Mass Analysis of Antibody and ADC

[1088] Measurement of intact mass for the ADC samples by LC-ESI-MS was performed to determine payload distribution profile and to calculate the average DAR. Each testing sample (0.5-1 μg) was loaded onto Waters Protein BEH C4 Column (300 Å, 1.7 μm, 2.1 mm×50 mm; Cat No. 186004495) with different gradients of the Mobile Phase A (ddH2O with 0.1% FA) and Mobile Phase B (ACN with 0.1% FA) (as shown in Table 25 below), at the flow rate of 0.25 μL/min, and monitored at λ280 nm. Then the product was eluted, and the mass spectra was acquired by Thermo Q EXACTIVE HF-X.

TABLE 25
LC-ESI-MS gradients for intact mass
analysis of Antibody and ADC

| No. | Time (min) | Flow (μL/min) | % B | Curve |
|---|---|---|---|---|
| 1 | 0.000 | Equilibration | | |
| 2 | 0.000 | 0.250 | 10.0 | 5 |
| 3 | New Row | | | |
| 4 | 0.000 | Run | | |
| 5 | 0.000 | 0.250 | 10.0 | 5 |
| 6 | 3.000 | 0.250 | 10.0 | 5 |
| 7 | 7.000 | 0.250 | 90.0 | 5 |
| 8 | 8.000 | 0.250 | 90.0 | 5 |
| 9 | 8.100 | 0.250 | 10.0 | 5 |
| 10 | 10.000 | 0.250 | 10.0 | 5 |
| 11 | New Row | | | |

| | | |
|---|---|---|
| 12 | 10.000 | Stop Run |

### Example 23: In Vitro Cytotoxicity Assay in Tumor Lines

[1089] To test the ability of anti-HER2 or anti-STEAP2 antibody drug conjugates (ADCs) of the present disclosure to kill human cell lines, an in vitro cytotoxicity assay was performed. In vitro cytotoxicity of the ADCs, isotype control ADCs, and reference free payloads were evaluated using the CellTiter-Glo 2.0 Assay Kit (Promega, Cat #g9243), in which the quantity of ATP present is used to determine the number of viable cells in culture.

[1090] For the assay, Calu-3, SK-BR-3, NCI-H1975, C₄₂, or C₄₂/STEAP2 KO (knockout) cells were seeded at 1000 cells/well in poly-D-lysine coated white 96 well Biocoat plates (Corning #356693) in complete growth medium and grown overnight at 37° C. in 5% CO₂. Three-fold serial dilutions of anti-HER2 ADCs or isotype control ADCs were prepared in dilution media (Optimem+0.1% BSA) and added to cells at final concentrations ranging from 100 nM to 0.015 nM (concentrations were corrected for the DAR (drug antibody ratio) and dosed based on the effective payload concentration). Three-fold serial dilutions of free payloads were prepared in 100% DMSO, transferred to fresh dilution media, and then added to the cells at a final constant DMSO concentration of 0.2% and final payload concentrations ranging from 100 nM to 0.015 nM. The last well in each dilution series (untreated wells) served as blank controls containing only the media (ADCs) or media plus 0.2% DMSO (payloads) and was plotted as a continuation of the 3-fold serial dilution. Six days later, 100 μL of CellTiter glo 2.0 was added to each well, plates were mixed for 2 minutes on an orbital shaker, and plates were incubated at room temperature for 10 minutes. Relative light units (RLUs) were measured on an Envision luminometer (PerkinElmer), and cell viability was expressed as a percentage of the untreated (100% viable) cells. IC₅₀ values were determined using a four-parameter logistic equation over a 10-point dose response curve (GraphPad Prism). The maximum % kill was also determined for each test article as follows: 100−minimum percent viability. Two independent experiments were run (Tables 26 and 27, respectively, shown below) and the IC₅₀ values and maximum % kill of each test article are reported.

[1091] As shown in Tables 26 and 27, anti-HER2 ADCs conjugated via glutamines killed high HER2 expressing SK-BR-3 cells with IC₅₀ values ranging from 68.5 pM to 86.1 pM and maximum % kill values ranging from 82.2% to 93.3%. An anti-HER2 ADC conjugated via cysteines killed SK-BR-3 cells with an IC₅₀ value of 147 pM and a maximum % kill value of 90.9%. In a second experiment, anti-HER2 ADCs conjugated via glutamines killed high HER2 expressing Calu-3 and SK-BR-3 cells with IC₅₀ values ranging from of 183 pM to 431 pM and maximum % kill values ranging from 89.6% to 95.3%. An anti-HER2 ADC conjugated via cysteines killed SK-BR-3 and Calu-3 cells with IC₅₀ values of 1.16 nM and 1.38 nM, respectively and maximum % kill values of 85.9% and 94.2%, respectively. All anti-HER2 ADCs were weakly cytotoxic in low HER expressing NCI-H1975 cells with IC₅₀ values >100 nM, and all non-binding control ADCs were weakly cytotoxic in all tested cells with IC₅₀ values ≥40.1 nM. The unconjugated anti-HER2 antibodies were also weakly cytotoxic in all tested lines with IC₅₀ values ≥12.8 nM and maximum percent values less than or equal to 48.5%. The free Dxd payload released from the ADCs killed cells with IC₅₀ values ranging from 787 pM to 11.8 nM and maximum % kill values ranging from 96.1% to 98.2%.

TABLE 26
Cytotoxicity of anti-HER2 ADCs in SK-BR-3 and NCI-H1975 cells

| | | | | | SK-BR-3 | | NCI-H1975 | |
|---|---|---|---|---|---|---|---|---|
| | | | Conj. | | | Max % | | Max % |
| Test Article | Description | Target | Site | DAR | IC50 (M) | Kill | IC50 (M) | Kill |
| 11 | Anti HER2 Ab- | HER2 | Q295, | 8 | 8.61E−11 | 93.3 | >1.0E−07 | 7.0 |
| | [(BL7)-(LP1)₂]₄ | | Q297 | | | | | |
| 10 | Anti HER2 Ab- | HER2 | Q295, | 4 | 6.85E−11 | 89.3 | >1.0E−07 | 10.8 |
| | (AL1-LP1)₄ | | Q297 | | | | | |
| 3 | Anti HER2 Ab- | HER2 | Q295 | 1.8 | 7.06E−11 | 82.2 | >1.0E−07 | 2.9 |
| | (AL1-LP1)₂ | | | | | | | |
| 22 | Anti HER2 cys- | HER2 | Cys | 8.4 | 1.47E−10 | 90.9 | >1.0E−07 | 8.4 |
| (Comparison | GGFG-DxD | | | | | | | |
| ADC) | | | | | | | | |
| 21 | Isotype Ab | Nontarget | Q295, | 8 | >1.0E−07 | 10.5 | >1.0E−07 | 8.1 |
| | [(BL7)-(LP1)₂]₄ | control | Q297 | | | | | |
| 20 | Isotype Ab | Nontarget | Q295, | 4 | 2.28E−08 | 83 | >1.0E−07 | 4.2 |
| | (AL1-LP1)₄ | control | Q297 | | | | | |
| 6 | Isotype Ab | Nontarget | Q295 | 2 | >1.0E−07 | 0 | >1.0E−07 | 4.3 |
| | (AL1-LP1)₂ | control | | | | | | |
| 23 | Isotype Ab cys- | Nontarget | Cys | 6.9 | >1.0E−07 | 41.9 | >1.0E−07 | 2.8 |
| (Comparison ADC) | GGFG-DxD | control | | | | | | |
| Dxd | Free payload | NA | NA | NA | 7.87E−10 | 97.1 | 8.91E−09 | 95.9 |
| [chemical structure] | | | | | | | | |

TABLE 27
Cytotoxicity of anti-HER2 ADCs in SK-BR-3, Calu-3, and NCI-H1975 cells

| | | | | | SK-BR-3 | | Calu-3 | | NCI-H1975 | |
|---|---|---|---|---|---|---|---|---|---|---|
| | | | | | | Max | | Max | | Max |
| Test | | | Conjugation | | IC50 | % | IC50 | % | IC50 | % |
| Article | Description | Target | site | DAR | (M) | Kill | (M) | Kill | (M) | Kill |
| 11 | Anti HER2 Ab- | HER2 | Q295, | 8 | 1.86E−10 | 95.3 | 4.31E−10 | 94.2 | >1.0E−07 | 13.6 |
| | [(BL7)-(LP1)₂]₄ | | Q297 | | | | | | | |
| 10 | Anti HER2 Ab- | HER2 | Q295, | 4 | 1.83E−10 | 89.7 | 4.14E−10 | 89.6 | >1.0E−07 | 15.5 |
| | (AL1-LP1)₄ | | Q297 | | | | | | | |
| 22 | Anti HER2 | HER2 | Cys | 7 | 1.16E−09 | 85.9 | 1.38E−09 | 94.2 | >1.0E−07 | 20.4 |
| (Comparison | cys-GGFG- | | | 4 | | | | | | |
| ADC) | DxD | | | | | | | | | |
| Dxd | Free payload | NA | NA | NA | 1.56E−09 | 98.2 | 2.14E−09 | 96.3 | 1.18E−08 | 96.1 |
| 7 | Anti HER2 Ab | HER2 | NA | NA | 1.28E−08 | 48.5 | >1.0E−07 | 23.3 | >1.0E−07 | 21.1 |
| | with N297Q | | | | | | | | | |
| | Fc, | | | | | | | | | |
| | unconjugated | | | | | | | | | |
| | antibody | | | | | | | | | |
| 21 | Isotype Ab | Nontarget | Q295, | 8 | >1.0E−07 | 21.7 | >1.0E−07 | 0.6 | >1.0E−07 | 6.4 |
| | [(BL7)-(LP1)₂]₄ | control | Q297 | | | | | | | |
| 1 | Anti HER2 Ab, | HER2 | NA | NA | 2.64E−08 | 43.0 | >1.0E−07 | 24.3 | >1.0E−07 | 15.7 |
| | Unconjugated | | | | | | | | | |
| | antibody | | | | | | | | | |
| 20 | Isotype Ab | Nontarget | Q295, | 4 | 4.01E−08 | 78.9 | 7.96E−08 | 53.9 | >1.0E−07 | 12.5 |
| | (AL1-LP1)₄ | control | Q297 | | | | | | | |

[1092] Table 28, below, summarizes the data for cytotoxicity of anti-STEAP2 ADCs prepared according to the present disclosure in C4-2 and C4-2/STEAP2 KO cells.

TABLE 28
Cytotoxicity of anti-STEAP2 ADCs in C4-2 and C4-2/STEAP2 KO cells

| | | | | | C4-2 | | C4-2/STEAP2 KO | |
|---|---|---|---|---|---|---|---|---|
| | | | | | | Max | | Max |
| Test | | | Conjugation | | IC50 | % | IC50 | % |
| Article | Description | Target | site | DAR | (M) | Kill | (M) | Kill |
| 15 | Anti STEAP2 | STEAP2 | Q295, | 4 | 3.15E−08 | 54.8 | >1.0E−07 | 4.2 |
| | Ab-(AL1-LP1)₄ | | Q297 | | | | | |
| 16 | Anti STEAP2 | STEAP2 | Q295, | 8 | 3.22E−08 | 58.4 | >1.0E−07 | 0.0 |
| | Ab-[(BL7)- | | Q297 | | | | | |
| | (LP1)₂]₄ | | | | | | | |
| Dxd | (Free payload) | NA | NA | NA | 2.54E−09 | 81.7 | 3.43E−09 | 88.9 |
| 21 | Isotype Ab | Nontarget | Q295, | 8 | >1.0E−07 | 7.8 | >1.0E−07 | 5.8 |
| | [(BL7)-(LP1)₂]₄ | control | Q297 | | | | | |
| 12 | Anti STEAP2 | STEAP2 | NA | NA | >1.0E−07 | 10.6 | >1.0E−07 | 9.4 |
| | mAb, | | | | | | | |
| | unconjugated | | | | | | | |
| | antibody | | | | | | | |

[1093] As shown in Table 28, anti-STEAP2 ADCs conjugated via N297Q killed C4-2 cells with IC₅₀ values of 31.5 nM and 32.2 nM and maximum % kill values of 54.8% and 58.4%; whereas these same ADCs were weakly cytotoxic in C4-2/STEAP2 KO cells with IC₅₀ values >100 nM. The non-binding control ADCs and unconjugated anti-STEAP2 antibodies were also weakly cytotoxic in both tested cells lines with IC₅₀ values >100 nM. The free Dxd payload released from the ADCs killed both C4-2 and C4-2/STEAP2 KO cells with IC₅₀ values of 2.54 nM and 3.43 nM, respectively, and maximum % kill values of 81.7% and 98.9%, respectively.

### Example 24: SKBR3 cell-based assay

[1094] Anti-proliferation assays were performed using a SK-BR-3 human breast adenocarcinoma (pleural effusion) cell line. The cells were grown in McCoy's 5a Medium supplemented with 10% FBS, penicillin/streptomycin and L-glutamine. Cells were seeded 1000/well in 96-well plate in 80 ul complete growth media one day prior to adding ADCs and incubated at 37° C. 5% CO2 overnight. The ADCs were 1:3 serially diluted 10 points in assay media (Opti-MEM+0.1% BSA). The concentrations of the testing ADCs cover the range of 1 nM to −1000 nM and also starting from different concentrations based on the cell killing potency in order to see EC50 covers, leaving the last well (10^{th}) as blank (no ADC or compound). Compounds were first 1:3 serially diluted 10 points in DMSO starting from 50 uM (the starting concentration of each compounds are different according to the EC50s), leaving the last well as blank (contains only DMSO). 10 ul DMSO-diluted compound was transferred to 990 ul assay media (Opti-MEM+0.1% BSA) in a 96-well deep well dilution plate. 20 ul assay media-diluted ADC and compound were added to cells. Cells were incubated at 37° C. 5% CO₂ for 6 days (144 hrs). Plates were developed by adding 100 ul CTG reagent/well to the cells CellTiter-Glo®, from Promega, Cat. No G7573), shaken at room temperature for 10 min, sealed with white adhesive bottom seal and luminescence was read with Envision. kill %=[1−(T144ₛₐₘₚₗₑ−T144_{blank})/(T144_{DMSO}−T144_{blank})]×100%. Here, T144 is the data from time at 144 hours. The solution of payload compounds are prepared following: Compounds were first 1:3 serially diluted 10 points in DMSO starting from the working concentration (the starting concentration of each compounds are different according to the EC50s), leaving the last well as blank (contains only DMSO). 10 ul DMCO-diluted compound was transferred to 990 ul assay media (Opti-MEM+0.1% BSA) in a 96-well deep well dilution plate. 20 ul assay media-diluted ADC and compound is added to cells.

[1095] The EC50 values for the ADCs and control ADCs, as well the free payload (DXD and P3) were summarized in Table 21 and Table 23.

### Example 25: In Vivo FGFR2 ADC Efficacy Study

[1096] This experiment measured the effect of FGFR2b Antibody-Drug Conjugates (ADCs) according to the disclosure on the growth of SNU-16 gastric cancer xenographs.

TABLE 29
FGFR2 ADCs:

| ADC | | | | | Link- | | | | |
|---|---|---|---|---|---|---|---|---|---|
| Des- | Tar- | Fc | Site of | | er | | | | |
| crip- | get/ | modifi- | Conju- | Azido | Pay- | Pay- | | | |
| tion | mAb | cation | gation | Linker | load | load | Structure of Modification | DAR | Dose |
| Con- trol Dxd ADC | Non- tar- geting con- trol | N297Q | Q295, Q297 | BL7 | LP1 | P2 (Dxd) | [chemical structure] | 7.9 | 10 mg/ kg |
| FGFR2 b-2 Dxd ADC | FGFR- 2b | N297Q | Q295, Q297 | BL7 | LP1 | P2 (Dxd) | [chemical structure] | 7.5 | 1, 3 or 10 mg/ kg |
| FGFR2 b-1 Dxd ADC | FGFR- 2b | N297Q | Q295, Q297 | BL7 | LP1 | P2 (Dxd) | [chemical structure] | 7.9 | 1, 3 or 10 mg/ kg |
| Control Dxd ADC | Non- tar- geting con- trol | N297Q | Q295, Q297 | AL1 | LP1 | P2 (Dxd) | [chemical structure] | 3.7 | 3 mg/ kg |
| FGFR2 b-1 Dxd ADC | FGFR2b | N297Q | Q295, Q297 | AL1 | LP1 | P2 (Dxd) | [chemical structure] | 3.7 | 0.3, 1 or 3 mg/ kg |

### Experimental Procedure

[1097] To assess the anti-tumor activity of FGFR2b Dxd ADCs against SNU16 xenografts (human gastric cancer xenografts), 5×10⁶ SNU-16 cells (ATOC) mixed with Matrigel (ED Biosciences) were implanted subcutaneously into the flank of male BALE/c SCID mice (6-8 weeks old, Jackson Laboratory). After tumors reached an average volume of 200-250 mm³, mice were randomized into groups for treatment (n=6 mice per group). All ADCs were administered via subcutaneous injection. Tumor volumes were measured twice per week over the course of the experiment. Averages (mean+/−standard deviation) of the tumor growth (change in tumor volume from the start of treatment through the end of the experiment) were calculated for each treatment group. The percent decrease of tumor growth was calculated from comparison to the isotype control group, and the percent regression of tumors at the end of the experiment was calculated from comparison to the tumor volume at the start of treatment. The results from two separate experiments utilizing ADCs with different DARs are shown in Table 30.

TABLE 30
Inhibition of SNU-16 xenograft growth in BALB/c SCID mice

| | | | | |
|---|---|---|---|---|
| | Total | Tumor growth in | Average % | |
| | Payload | mm3 from start of | Decrease in | Average % |
| | Dose | treatment | Tumor | Tumor |
| Antibody (mg/kg) | (ug/kg) | (mean ± SD) | Growth | Regression |

Experiment 1 (DAR 8 ADCs)

| | | | | |
|---|---|---|---|---|
| FGFR2b-2 Dxd ADC | 25 | −27.2 ± 89.2 | 103.3 | 11.0 |
| (1 mg/kg) | | | | |
| FGFR2b-2 Dxd ADC | 76 | −254.4 ± 34.1 | 131.4 | 99.1 |
| (3 mg/kg) | | | | |
| FGFR2b-2 Dxd ADC | 254 | −259.0 ± 25.8 | 131.9 | 100 |
| (10 mg/kg) | | | | |
| FGFR2b-1 Dxd ADC | 26 | 4.7 ± 181.9 | 99.4 | 6.7 |
| (1 mg/kg) | | | | |
| FGFR2b-1 Dxd ADC | 79 | −259.8 ± 40.1 | 132.0 | 99.8 |
| (3 mg/kg) | | | | |
| FGFR2b-1 Dxd ADC | 264 | −260.8 ± 25.0 | 132.1 | 100 |
| (10 mg/kg) | | | | |
| Control Dxd ADC | 264 | 579.5 ± 229.3 | 28.6 | −192.9 |
| (10 mg/kg) | | | | |
| Vehicle control | | 811.5 ± 556.1 | | −291.8 |

Experiment 2 (DAR 4 ADCs)

| | | | | |
|---|---|---|---|---|
| FGFR2b-1 Dxd ADC | 4 | 187.0 ± 117.1 | 72.5 | −74.8 |
| (0.3 mg/kg) | | | | |
| FGFR2b-1 Dxd ADC | 13 | −43.5 ± 91.6 | 106.4 | 16.3 |
| (1 mg/kg) | | | | |
| FGFR2b-1 Dxd ADC | 38 | −254.2 ± 30.2 | 137.4 | 99.7 |
| (3 mg/kg) | | | | |
| Control Dxd ADC | 38 | 679.0 ± 253.1 | | −259.1 |
| (3 mg/kg) | | | | |

[1098] As shown in Table 30 and FIGS. 8A and 8B3, the results demonstrate that FGFR2b Dxd ADCs induce complete regression of SNU-16 tumor xenografts in a dose dependent manner.

### Example 26: In Vivo HER2 ADC Efficacy Study

[1099] This experiment compared the Trastuzumab-GGFG-DxD (comparator anti-HER2 ADC control) and Trastuzumab-vcPAB-G-DxD (anti-HER2 ADC according to the invention) in N₈₇ xenogirafts.

TABLE 30
HER2 ADCs

| | | | Site | | | | | | |
|---|---|---|---|---|---|---|---|---|---|
| Des- | | Fc | of | | | | | | |
| crip- | Target/ | modifi- | Conju- | Azido | Linker | | Pay- | | |
| tion | mAb | cation | gation | Linker | Payload | Structure of Modification | load | DAR | Dose |
| Con- | Non- | WT | | | | | | | 5 mg/kg |
| trol | tar- | | | | | | | | Q1Wx1 |
| | geting | | | | | | | | |
| | control | | | | | | | | |
| COMP | HER2 | WT | | | | | | | 5 mg/kg |
| mAb | (Tras- | | | | | | | | Q1Wx1 |
| | tuzu | | | | | | | | |
| | mab) | | | | | | | | |
| Con- trol- Dxd ADC | Non- tar- geting control | WT | Cys- teine | NA | COMP LP mc- GGFG- Dxd | [chemical structure] | P2 (Dxd) | 7.5 | 5 mg/kg Q1Wx1 |
| COMP- Dxd- ADC Con- trol | HER2 (Tras- tuzu mab) | WT | Cys- teine | NA | COMP LP mc- GGFG- Dxd | [chemical structure] | P2 (Dxd) | 8 | 5 mg/kg Q1Wx1 |
| Con- trol- Dxd- ADC | Non- tar- geting control N297Q | N297Q | Q295 and Q297 | BL7 (branch- ed) | LP1 (vcPAB- G-Dxd) | [chemical structure] | P2 (Dxd) | 7.8 | 5 mg/kg Q1Wx1 |
| COMP- Dxd- ADC | HER2 (Tras- tuzu mab) | N297Q | Q295 and Q297 | BL7 (branch- ed) | LP1 (vcPAB- G-Dxd) | [chemical structure] | P2 (Dxd) | 7.7 | 5 mg/kg Q1Wx1 |

### Experimental Procedure:

[1100] The anti-tumor efficacy of Trastuzumab Comparator antibody was assessed in HER2 IHC 3+N₈₇ cell line xenograft models. Tumors were established by the subcutaneous implantation of 5×10⁶ cells mixed 1:1 with Matrigel on the right flank of female SCID mice. Tumors were grown to −250 mm³ before treatment initiation, approximately 7 days post-implantation. Mice were randomized into groups of 6 and treated with a single dose of test or control ADCs. Tumor growth was monitored for 70 days post-treatment.

### Experimental Results:

[1101] This study, performed in in HER2 IHC 3+ N₈₇ cell line xenograft bearing SCID mice assessed the activity of Trastuzumab Comparator antibody conjugated to either a DxD comparator LP or LP1 according to the disclosure conjugated through trans-glutaminase chemistry and a branched azido linker BL7. A single dose of 5 mg/kg was designed to minimize the effect of naked Trastuzumab in N₈₇ xenografts, which are addicted to HER2 signaling. The growth of xenografts treated with Control-comparator-Dxd LP or Control-LP1 ADCs was not significantly delayed relative to naked Control ab treated tumors. However, a complete tumor regression was observed in tumors treated with Trastuzumab-comparator-Dxd LP and Trastuzumab-LP1 according to the disclosure at the 5 mg/kg ADC dose over the course of the study. The effect of the two test ADCs was indistinguishable in this study.

TABLE 31
Trastuzumab-GGFG-Dxd and Trastuzumab-TG-LP1 mediated tumor regression of N87 xenografts.

| Days | | | | | | | | | | | | |
|---|---|---|---|---|---|---|---|---|---|---|---|---|
| post | Naked Control | | HER2 mAb | | Control-Dxd | | HER2-Dxd | | Control-LP1 | | HER2-LP1 | |
| implant | Average | StErr | Average | StErr | Average | StErr | Average | StErr | Average | StErr | Average | StErr |
| 7 | 160 | 13 | 159 | 8 | 161 | 6 | 159 | 10 | 146 | 13 | 154 | 10 |
| 10 | 245 | 18 | 243 | 16 | 247 | 15 | 247 | 15 | 247 | 15 | 247 | 15 |
| (Dosing) | | | | | | | | | | | | |
| 13 | 424 | 36 | 366 | 20 | 399 | 48 | 273 | 19 | 432 | 50 | 307 | 40 |
| 15 | 530 | 55 | 410 | 29 | 534 | 59 | 158 | 23 | 497 | 43 | 143 | 18 |
| 17 | 686 | 84 | 506 | 35 | 587 | 67 | 75 | 6 | 670 | 89 | 82 | 12 |
| 20 | 870 | 106 | 602 | 34 | 838 | 74 | 44 | 8 | 776 | 81 | 40 | 3 |
| 22 | 1030 | 102 | 735 | 53 | 963 | 117 | 35 | 9 | 926 | 83 | 29 | 5 |
| 24 | 1226 | 200 | 788 | 60 | 1109 | 88 | 31 | 7 | 1023 | 76 | 26 | 4 |
| 27 | 1439 | 237 | 957 | 94 | 1269 | 129 | 11 | 2 | 1242 | 141 | 15 | 4 |
| 30 | 1678 | 247 | 1190 | 103 | 1507 | 180 | 10 | 2 | 1507 | 190 | 14 | 4 |
| 33 | | | 1310 | 36 | | | 11 | 2 | | | 14 | 2 |
| 37 | | | 1579 | 61 | | | 8 | 2 | | | 10 | 2 |
| 41 | | | 1998 | 198 | | | 8 | 2 | | | 15 | 2 |
| 44 | | | | | | | 5 | 1 | | | 12 | 5 |
| 50 | | | | | | | 5 | 0 | | | 12 | 6 |
| 58 | | | | | | | 7 | 2 | | | 12 | 6 |
| 65 | | | | | | | 7 | 2 | | | 12 | 6 |

[1102] This study demonstrates tat the LP1 Dxd linker payload according to the disclosure conjugated to Trastuzumab antibody is at least as efficacious as the leading DxD comparator linker payload conjugated to the same antibody.

### Example 27: In Vivo STEAP2 ADC Efficacy Study

[1103] This experiment assessed STEAP2 ADC efficacy in the STEAP2 cell line xenograft model.

TABLE 32
STEAP2 ADCs

| Des- | | Fc | Site of | | Linker | | | | |
|---|---|---|---|---|---|---|---|---|---|
| crip- | Target/ | modifi- | Conju- | Azido | Pay- | Pay- | | | |
| tion | mAb | cation | gation | Linker | load | load | Structure of Modification | DAR | Dose |
| Control Dxd ADC | Non- target- ing con- trol | N297Q | Q295, Q297 | BL7 | LP1 (vcPA B-G- Dxd) | P2 (Dxd) | [chemical structure] | 7.8 | 10 mg/ kg |
| STEA P2 Dxd ADC | STEA P2 | N297Q | Q295, Q297 | BL7 | LP1 (vcPA B-G- Dxd) | P2 (Dxd) | [chemical structure] | 8.0 | 3 or 10 mg/ kg |

### Experimental Procedure:

[1104] To assess the activity of STEAP2 Dxd ADCs against C4-2 xenografts, tumors were established by the subcutaneous implantation of 7.5×10⁶ C4-2 cells mixed 1:1 with Matrigel on the right flank of male SCID mice. Tumors were grown to around 200 mm³ before treatment initiation, 15 days post-implantation. Mice were randomized into groups of 8 based on tumor volume and treated with a single dose of test or control ADC. Tumor growth was monitored for 50 days post-treatment.

### Experimental Results:

[1105] The in vivo efficacy of STEAP2 Dxd ADCs were assessed relative to control agents (Table 33). Control Dxd ADC partially delayed tumor growth relative to vehicle treated tumors. Single dose 3 mg/kg STEAP2 Dxd ADC caused durable inhibition of tumor growth. STEAP2 Dxd ADC at 10 mg/kg caused complete tumor regression and no tumor re-growth was observed for the duration of the study. C4-2 tumors cause weight loss in mice as tumors grow. STEAP2 Dxd ADC at 3 or 10 mg/kg cause partial and complete rescue of weight loss respectively over the course of the study.

TABLE 33
Anti-STEAP2 ADCs mediated regression of C4-2 xenografts
relative to controls (Day 30 post-treatment).

| | | Tumor volume | Tumor growth |
|---|---|---|---|
| | | (mm³) at | (mm³) from |
| | | termination of | start of |
| | | vehicle group | treatment |
| Article | ADC Dose | (mean ± SD) | (mean ± SD) |
| Vehicle | n/a | 1343 ± 362 | 1127 ± 363 |
| Control Dxd ADC | 10 mg/kg | 611 ± 436 | 392 ± 433 |
| STEAP2 Dxd ADC | 3 mg/kg | 131 ± 106 | −83 ± 110 |
| STEAP2 Dxd ADC | 10 mg/kg | 0 ± 0 | −203 ± 26 |

[1106] As shown above, anti-STEAP2 ADCs according to the disclosure demonstrated significant anti-tumor efficacy against STEAP2 positive C4-2 cell line xenografts.

### Example 28: In Vivo PRLR ADC Efficacy Study

[1107] This experiment assessed anti-PRLR ADC efficacy in the T47D cell line xenograft model. The structure of the payload DM1 is provided below:

[chemical structure]

[1108] The linker-payload M1 (mcc-DM1) was prepared according to WO2015/031396 (PCT/US14/52757), which is incorporated by reference herein in its entirety. The linker-payload M1 was conjugated to a lysine residue of either a nontargeting control antibody or the anti-PRLR antibody as described in WO2015/031396.

TABLE 34
PRLR ADCs

| | | | Site | | | | | |
|---|---|---|---|---|---|---|---|---|
| | | | of | | | | | |
| | | Fc | Con- | Azi- | Link- | | | |
| Des- | Tar- | modi | ju- | do | er | | | |
| crip- | get/ | fica- | ga- | Link- | Pay- | Pay- | | |
| tion | mAb | tion | tion | er | load | load | Structure of Modification | Dose |
| Con- trol DM1 ADCI | Non- tar- get- ing con- trol | WT | Lys | NA | M1 (mcc- DM1) | DM1 | [chemical structure] | 10 mg/ kg SD |
| PRLR DM1 ADC | PRLR | WT | Lys | NA | M1 (mcc- DM)1 | DM1 | [chemical structure] | 10 mg/ kg SD |
| Con- trol Dxd ADC | Non- tar- get- ing con- trol | N297Q | Q295 and Q297 | AL1 | LP1 (vc- PAB- G-Dxd) | P2 (Dxd) | [chemical structure] | 10 mg/ kg SD |
| PRLR Dxd ADC | PRLR | N297Q | Q295 and Q297 | AL1 | LP1 (vc- PAB- G-Dxd) | P2 (Dxd) | [chemical structure] | 5 or 10 mg/ kg, SD |

SD = single dose

### Experimental Procedure:

[1109] Tumorigenic T47D cells named T47DvII were previously generated via in vivo passaging. T47D tumors were established by the subcutaneous implantation of 10×10⁶ T47DvII cells mixed 1:1 with Matrigel on the right flank of female SCID mice previously implanted with a 90-Day slow release estrogen pellet (Innovative Research of America). Tumors were grown to 100-200 mm³ before treatment initiation, approximately 20 days post-implantation. Mice were randomized into groups of 7 and treated with a single dose of test or control ADC. Tumor growth was monitored for 45 days post-treatment.

### Experimental Results:

[1110] The single dose in vivo efficacy of PRLR DXd ADC was compared to PRLR DM 1 ADC (Table 35). Neither Control DM 1 nor Control DXd ADCs delayed tumor growth relative to vehicle treated tumors. A single dose of 10 mg/kg PRLR DM1 ADC caused significant regression of tumors. However, greater tumor regression was observed with both 5 and 10 mg/kg PRLR Dxd ADC. No treatment related changes in weight were observed; all groups were observed to gain approximately 10-15% of body weight over the course of the study.

TABLE 35
Anti-PRLR ADCs mediated regression of T47D xenografts
relative to controls (Day 45 post-treatment).

| | | Tumor volume | Tumor growth |
|---|---|---|---|
| | | (mm³) at | (mm³) from |
| | | termination of | start of |
| | | vehicle group | treatment |
| Article | ADC Dose | (mean ± SD) | (mean ± SD) |
| Vehicle | n/a | 815 ± 384 | 639 ± 362 |
| Control DM1 ADC | 10 mg/kg | 823 ± 269 | 650 ± 247 |
| PRLR DM1 ADC | 10 mg/kg | 120 ± 56 | −49 ± 74 |
| Control Dxd ADC | 10 mg/kg | 801 ± 191 | 643 ± 186 |
| PRLR Dxd ADC | 5 mg/kg | 55 ± 18 | −118 ± 39 |
| PRLR Dxd ADC | 10 mg/kg | 42 ± 14 | −124 ± 20 |

[1111] As shown above, anti-PRLR ADCs demonstrated significant anti-tumor efficacy against PRLR positive T47D cell line xenografts.

### Example 29: In Vivo MET ADC Efficacy Study

[1112] This experiment assessed anti-MET ADC efficacy in EBC1 xenografts. The anti-MET/MET bispecific antibody utilized in this Example is described in US2018/0134794, incorporated by reference herein in its entirety.

TABLE 36
MET ADCs

| Des- | | Fc | Site of | | Linker | | | |
|---|---|---|---|---|---|---|---|---|
| crip- | Target/ | modifi- | Conju- | Azido | Pay- | Pay- | | |
| tion | mAb | cation | gation | Linker | load | load | Structure of Modification | Dose |
| Con- trol Dxd ADC | Non- target- ing control | WT | Q295 | BL7 | LP1 (vcPA B-G- Dxd) | P2 (Dxd) | [chemical structure] | 5 mg/ kg |
| Bi- spe- cific MET/ MET Dxd ADC | MET/ MET | N297Q | Q295 and Q297 | AL1 | LP1 (vcPA B-G- Dxd) | P2 (Dxd) | [chemical structure] | 1, 2.5 or 5 mg/ kg |

### Experimental Procedure:

[1113] The anti-tumor efficacy of an anti-MET bispecific MET/MET Dxd ADC was assessed in the EBC1 NSCLC xenograft. Tumors were established by the subcutaneous implantation of 5×10⁶ cells on the right flank of male SCID mice. Tumors were grown to −130 mm³ before treatment initiation. Mice were randomized into groups of 6 and treated with a single dose of test or control ADC. Tumor growth was monitored for 21 days post-treatment.

### Experimental Results:

[1114] Activity of MET/MET Dxd ADC were assessed in the EBC1 tumor xenograft model (Table 37). Here a single administration of MET/MET Dxd ADC was compared at doses of 1, 2.5 and 5 mg/kg. Administration of 1 mg/kg MET/MET Dxd ADC showed tumor growth delay relative to the respective control ADC. Treatment with MET/MET Dxd ADC at 2.5 and 5 mg/kg mediated significant and durable regression of tumor xenografts.

TABLE 37
MET/MET Dxd ADC mediated regression of EBC1 xenografts
relative to controls (Day 21 post-treatment).

| | | Tumor growth |
|---|---|---|
| | | (mm³) from |
| | | start of treatment |
| Article | ADC Dose | (mean ± SD) |

| | | | |
|---|---|---|---|
| Control Dxd ADC | 5 | mg/kg | 901 ± 90 |
| MET/MET Dxd ADC | 1 | mg/kg | 408 ± 164 |
| MET/MET Dxd ADC | 2.5 | mg/kg | −120 ± 0 |
| MET/MET Dxd ADC | 5 | mg/kg | −122 ± 0 |

[1115] As shown above, MET ADCs demonstrated significant anti-tumor efficacy against MET-amplified NSCLC cell line xenografts.

### Example 30: In Vivo EGFRvIII ADC Efficacy Study

[1116] This experiment assessed anti-EGFRvIII ADC efficacy in U251/EGFRvIII xenograft models.

TABLE 38
EGFRvIII ADCs

| Des- | | Fc | Site of | Azido | | | | | |
|---|---|---|---|---|---|---|---|---|---|
| crip- | Target/ | modifi- | Conju- | Link- | Linker | Pay- | | | |
| tion | mAb | cation | gation | er | Payload | load | Structure of Modification | DAR | Dose |
| Control Dxd ADC | Non- target- ing control | N297Q | Q295, Q297 | BL7 | LP1 (vcPAB- G-Dxd) | P2 (Dxd) | [chemical structure] | 7.8 | 3 mg/ kg |
| EGFR vIII Dxd ADC | EGFR vIII | N297Q | Q295, Q297 | BL7 | LP1 (vcPAB- G-Dxd) | P2 (Dxd) | [chemical structure] | 7.7 | 0.5, 1 or 3 mg/ kg |

[1117] The anti-tumor efficacy of EGFRvIII Dxd ADC was assessed in U251 glioblastoma cell line xenografts models transfected to express EGFRvIII, as endogenous expression of the target is lost following in vitro culture. U251/EGFRvIII were established by the subcutaneous implantation of 10×10⁶ cells mixed 1:1 with Matrigel on the right flank of male SCID mice. Tumors were grown to −150 mm³ before treatment initiation, approximately 30 days post-implantation. Mice were randomized into groups of 8 and treated with a single dose of test or control ADC. Tumor growth was monitored for 70 days post-treatment.

### Experimental Results:

[1118] A study in U251/EGFRvIII xenograft bearing mice assessed the activity of EGFRvIII Dxd ADC following a single dose at 0.5, 1 or 3 mg/kg ADC (Table 39). The growth of xenografts treated with Control Dxd ADC was only slightly delayed relative to vehicle control treated tumors. However, a significant delay in tumor growth was observed in tumors treated with EGFRvIII Dxd ADC. Higher ADC doses resulted in more durable anti-tumor activity. All anti-EGFRvIII treatment groups survived until completion of the study around 70 days post-dosing. All groups were observed to gain approximately 10-15% of body weight over the course of the study.

TABLE 39
EGFRvIII Dxd ADCs mediated regression of U251/EGFRvIII xenografts
relative to controls (Day 27 post-treatment).

| | | | Tumor volume | Tumor growth |
|---|---|---|---|---|
| | | | (mm³) at | (mm³) |
| | | | termination of | from start of |
| | | | vehicle group | treatment |
| Article | ADC Dose | | (mean ± SD) | (mean ± SD) |
| Vehicle | n/a | | 1311 ± 453 | 1159 ± 452 |
| Control Dxd ADC | 3 | mg/kg | 805 ± 169 | 657 ± 168 |
| EGFRvIII Dxd | 0.5 | mg/kg | 232 ± 34 | 85 ± 41 |
| ADC | | | | |
| EGFRvIII Dxd | 1 | mg/kg | 138 ± 18 | −11 ± 23 |
| ADC | | | | |
| EGFRvIII Dxd | 3 | mg/kg | 106 ± 15 | −44 ± 20 |

ADC

EGFRvIII Dxd ADC demonstrates significant anti-tumor efficacy against EGFRvIII transfected glioblastoma multiforme cell line xenografts

[1119] As various changes can be made in the above-described subject matter without departing from the scope and spirit of the present disclosure, it is intended that all subject matter contained in the above description, or defined in the appended claims, be interpreted as descriptive and illustrative of the present disclosure. Many modifications and variations of the present disclosure are possible in light of the above teachings. Accordingly, the present description is intended to embrace all such alternatives, modifications, and variances which fall within the scope of the appended claims.

[1120] All patents, applications, publications, test methods, literature, and other materials cited herein are hereby incorporated by reference in their entirety as if physically present in this specification.

The application's sequence listing, which the Patent Office published only in electronic form, follows.

SEQUENCE LISTING (2114 sequences)

SEQ ID NO: 1 - DNA, 399 bp, synthetic construct
  misc_feature 1..399: note = Description of Artificial Sequence: Synthetic polynucleotide
  source 1..399: mol_type = other DNA
caggtacagctgcagcagtcaggtccaggactggtgaagccctcgcagaccctctcactcacctgtgccatctccggggacagtgtctctagcaacagtgctgcttggaactggatcaggcagtccccatcgagaggccttgagtggctgggaaggacatactataggtccaagtggtataatgattatgcagtatctgtgaaaagtcgaataaccatcaacccagacacatccaagaaccagttctccctgcacctgaactctgtgactcccgaggacacggctgtgtattactgtgcaagggcgggaattgtagtagtaccaggtccggatatttattactactactactacggtatggacgtctggggccaagggaccacggtcaccgtctcctca

SEQ ID NO: 2 - protein, 133 aa, synthetic construct
  REGION 1..133: note = Description of Artificial Sequence: Synthetic polypeptide
QVQLQQSGPGLVKPSQTLSLTCAISGDSVSSNSAAWNWIRQSPSRGLEWLGRTYYRSKWYNDYAVSVKSRITINPDTSKNQFSLHLNSVTPEDTAVYYCARAGIVVVPGPDIYYYYYYGMDVWGQGTTVTVSS

SEQ ID NO: 3 - DNA, 30 bp, synthetic construct
  misc_feature 1..30: note = Description of Artificial Sequence: Synthetic oligonucleotide
  source 1..30: mol_type = other DNA
ggggacagtgtctctagcaacagtgctgct

SEQ ID NO: 4 - protein, 10 aa, synthetic construct
  REGION 1..10: note = Description of Artificial Sequence: Synthetic peptide
GDSVSSNSAA

SEQ ID NO: 5 - DNA, 27 bp, synthetic construct
  misc_feature 1..27: note = Description of Artificial Sequence: Synthetic oligonucleotide
  source 1..27: mol_type = other DNA
acatactataggtccaagtggtataat

SEQ ID NO: 6 - protein, 9 aa, synthetic construct
  REGION 1..9: note = Description of Artificial Sequence: Synthetic peptide
TYYRSKWYN

SEQ ID NO: 7 - DNA, 69 bp, synthetic construct
  misc_feature 1..69: note = Description of Artificial Sequence: Synthetic oligonucleotide
  source 1..69: mol_type = other DNA
gcaagggcgggaattgtagtagtaccaggtccggatatttattactactactactacggtatggacgtc

SEQ ID NO: 8 - protein, 23 aa, synthetic construct
  REGION 1..23: note = Description of Artificial Sequence: Synthetic peptide
ARAGIVVVPGPDIYYYYYYGMDV

SEQ ID NO: 9 - DNA, 324 bp, synthetic construct
  misc_feature 1..324: note = Description of Artificial Sequence: Synthetic polynucleotide
  source 1..324: mol_type = other DNA
gacatccagatgacccagtctccatcctccctgtctgcatctgtaggagacagagtcaccatcacttgccgggcaagtcagagcattagaagctatttaaattggtatcagcagaaaccagggaaagcccctaagctcctgatctatgctgcatccagtttgcaaagtggggtcccatcaaggttcagtggcagtggatctgggacagatttcactctcaccatcagcagtctgcaacctgaagattttgcaacttactactgtcaacagagttacagtacccctccgatcaccttcggccaagggacacgactggagattaaa

SEQ ID NO: 10 - protein, 108 aa, synthetic construct
  REGION 1..108: note = Description of Artificial Sequence: Synthetic polypeptide
DIQMTQSPSSLSASVGDRVTITCRASQSIRSYLNWYQQKPGKAPKLLIYAASSLQSGVPSRFSGSGSGTDFTLTISSLQPEDFATYYCQQSYSTPPITFGQGTRLEIK

SEQ ID NO: 11 - DNA, 18 bp, synthetic construct
  misc_feature 1..18: note = Description of Artificial Sequence: Synthetic oligonucleotide
  source 1..18: mol_type = other DNA
cagagcattagaagctat

SEQ ID NO: 12 - protein, 6 aa, synthetic construct
  REGION 1..6: note = Description of Artificial Sequence: Synthetic peptide
QSIRSY

SEQ ID NO: 13-14 - skipped (2 entries)

SEQ ID NO: 15 - DNA, 30 bp, synthetic construct
  misc_feature 1..30: note = Description of Artificial Sequence: Synthetic oligonucleotide
  source 1..30: mol_type = other DNA
caacagagttacagtacccctccgatcacc

SEQ ID NO: 16 - protein, 10 aa, synthetic construct
  REGION 1..10: note = Description of Artificial Sequence: Synthetic peptide
QQSYSTPPIT

SEQ ID NO: 17 - DNA, 381 bp, synthetic construct
  misc_feature 1..381: note = Description of Artificial Sequence: Synthetic polynucleotide
  source 1..381: mol_type = other DNA
caggtgcagctggtgcagtctggggctgaggtgaagaagcctggggcctcagtgaaggtctcctgcaaggcttctggatacaccttcaccggctacgatatgcactgggtgcgacaggcccctgggcaagggcttgagtggatgggatggatcaaccctaacagtggtggcacaaactatgcacagaagtttcagggcagggtcaccatgaccagggacacgtccatcagcacagcctacatggagctgagcaggctgagatctgacgacacggccgtgtattactgtgcgagaattgggatggtagtatcaggtgctaattactactactactacggtatggacgtctggggccaagggaccacggtcaccgtctcctca

SEQ ID NO: 18 - protein, 127 aa, synthetic construct
  REGION 1..127: note = Description of Artificial Sequence: Synthetic polypeptide
QVQLVQSGAEVKKPGASVKVSCKASGYTFTGYDMHWVRQAPGQGLEWMGWINPNSGGTNYAQKFQGRVTMTRDTSISTAYMELSRLRSDDTAVYYCARIGMVVSGANYYYYYGMDVWGQGTTVTVSS

SEQ ID NO: 19 - DNA, 24 bp, synthetic construct
  misc_feature 1..24: note = Description of Artificial Sequence: Synthetic oligonucleotide
  source 1..24: mol_type = other DNA
ggatacaccttcaccggctacgat

SEQ ID NO: 20 - protein, 8 aa, synthetic construct
  REGION 1..8: note = Description of Artificial Sequence: Synthetic peptide
GYTFTGYD

SEQ ID NO: 21 - DNA, 24 bp, synthetic construct
  misc_feature 1..24: note = Description of Artificial Sequence: Synthetic oligonucleotide
  source 1..24: mol_type = other DNA
atcaaccctaacagtggtggcaca

SEQ ID NO: 22 - protein, 8 aa, synthetic construct
  REGION 1..8: note = Description of Artificial Sequence: Synthetic peptide
INPNSGGT

SEQ ID NO: 23 - DNA, 60 bp, synthetic construct
  misc_feature 1..60: note = Description of Artificial Sequence: Synthetic oligonucleotide
  source 1..60: mol_type = other DNA
gcgagaattgggatggtagtatcaggtgctaattactactactactacggtatggacgtc

SEQ ID NO: 24 - protein, 20 aa, synthetic construct
  REGION 1..20: note = Description of Artificial Sequence: Synthetic peptide
ARIGMVVSGANYYYYYGMDV

SEQ ID NO: 25 - DNA, 321 bp, synthetic construct
  misc_feature 1..321: note = Description of Artificial Sequence: Synthetic polynucleotide
  source 1..321: mol_type = other DNA
gccatccagatgacccagtctccatcctccctgtctgcatatgtaggagacagagtcatcatcacttgccgggcaagtcagggcattagaaatgatttaggctggtatcagcagaaaccagggaaagcccctaagctcctgatctatgctgcatccagtttacaaagtggggtcccatcaaggttcagcggcagtagatctggcacagttttcactctcaccatcagcagcctgcagcctgaagattttgcaacttattactgtctgcaagattacaattacccgtggacgttcggccaagggaccaaggtggaaatcaaa

SEQ ID NO: 26 - protein, 107 aa, synthetic construct
  REGION 1..107: note = Description of Artificial Sequence: Synthetic polypeptide
AIQMTQSPSSLSAYVGDRVIITCRASQGIRNDLGWYQQKPGKAPKLLIYAASSLQSGVPSRFSGSRSGTVFTLTISSLQPEDFATYYCLQDYNYPWTFGQGTKVEIK

SEQ ID NO: 27 - DNA, 18 bp, synthetic construct
  misc_feature 1..18: note = Description of Artificial Sequence: Synthetic oligonucleotide
  source 1..18: mol_type = other DNA
cagggcattagaaatgat

SEQ ID NO: 28 - protein, 6 aa, synthetic construct
  REGION 1..6: note = Description of Artificial Sequence: Synthetic peptide
QGIRND

SEQ ID NO: 29-30 - skipped (2 entries)

SEQ ID NO: 31 - DNA, 27 bp, synthetic construct
  misc_feature 1..27: note = Description of Artificial Sequence: Synthetic oligonucleotide
  source 1..27: mol_type = other DNA
ctgcaagattacaattacccgtggacg

SEQ ID NO: 32 - protein, 9 aa, synthetic construct
  REGION 1..9: note = Description of Artificial Sequence: Synthetic peptide
LQDYNYPWT

SEQ ID NO: 33 - DNA, 360 bp, synthetic construct
  misc_feature 1..360: note = Description of Artificial Sequence: Synthetic polynucleotide
  source 1..360: mol_type = other DNA
gaggtgcagctggtggagtctgggggaggcttggtccagcctggggggtccctgagactctcctgtgcagcctctggattcaccttcagtacctatgctatgcactgggtccgccaggctccagggaagggactgcaacatgtttcaactattagtactaatggggttaacacatattatgcagactctgtgaagggcagattcaccatctccagagacaattccaagagcacgctgtatcttcaaatgggcagcctgagagctgaggacatggctgtatattactgtgcgagagataaagatttttggagtggttattttgactactggggccagggaaccctggtcaccgtctcctca

SEQ ID NO: 34 - protein, 120 aa, synthetic construct
  REGION 1..120: note = Description of Artificial Sequence: Synthetic polypeptide
EVQLVESGGGLVQPGGSLRLSCAASGFTFSTYAMHWVRQAPGKGLQHVSTISTNGVNTYYADSVKGRFTISRDNSKSTLYLQMGSLRAEDMAVYYCARDKDFWSGYFDYWGQGTLVTVSS

SEQ ID NO: 35 - DNA, 24 bp, synthetic construct
  misc_feature 1..24: note = Description of Artificial Sequence: Synthetic oligonucleotide
  source 1..24: mol_type = other DNA
ggattcaccttcagtacctatgct

SEQ ID NO: 36 - protein, 8 aa, synthetic construct
  REGION 1..8: note = Description of Artificial Sequence: Synthetic peptide
GFTFSTYA

SEQ ID NO: 37 - DNA, 24 bp, synthetic construct
  misc_feature 1..24: note = Description of Artificial Sequence: Synthetic oligonucleotide
  source 1..24: mol_type = other DNA
attagtactaatggggttaacaca

SEQ ID NO: 38 - protein, 8 aa, synthetic construct
  REGION 1..8: note = Description of Artificial Sequence: Synthetic peptide
ISTNGVNT

SEQ ID NO: 39 - DNA, 39 bp, synthetic construct
  misc_feature 1..39: note = Description of Artificial Sequence: Synthetic oligonucleotide
  source 1..39: mol_type = other DNA
gcgagagataaagatttttggagtggttattttgactac

SEQ ID NO: 40 - protein, 13 aa, synthetic construct
  REGION 1..13: note = Description of Artificial Sequence: Synthetic peptide
ARDKDFWSGYFDY

SEQ ID NO: 41 - DNA, 321 bp, synthetic construct
  misc_feature 1..321: note = Description of Artificial Sequence: Synthetic polynucleotide
  source 1..321: mol_type = other DNA
gaaattgtgatgacgcagtctccaggcaccctgtctgtgtctccaggggaaagagccaccctctcctgtagggccagtcagagtgttagtagcaacttagcctggtaccaccagaaacctggccaggctcccaggctcctcatctatggtgcatccaccagggccactggtttcccagccaggttcagtggcagtgggtctgggacagagttcactctcaccatcagcagcctgcagtcggaagattttgcagcttattactgtcagcagtataataattggcccatcaccttcggccaagggacacgactggagattaaa

SEQ ID NO: 42 - protein, 107 aa, synthetic construct
  REGION 1..107: note = Description of Artificial Sequence: Synthetic polypeptide
EIVMTQSPGTLSVSPGERATLSCRASQSVSSNLAWYHQKPGQAPRLLIYGASTRATGFPARFSGSGSGTEFTLTISSLQSEDFAAYYCQQYNNWPITFGQGTRLEIK

SEQ ID NO: 43 - DNA, 18 bp, synthetic construct
  misc_feature 1..18: note = Description of Artificial Sequence: Synthetic oligonucleotide
  source 1..18: mol_type = other DNA
cagagtgttagtagcaac

SEQ ID NO: 44 - protein, 6 aa, synthetic construct
  REGION 1..6: note = Description of Artificial Sequence: Synthetic peptide
QSVSSN

SEQ ID NO: 45-46 - skipped (2 entries)

SEQ ID NO: 47 - DNA, 27 bp, synthetic construct
  misc_feature 1..27: note = Description of Artificial Sequence: Synthetic oligonucleotide
  source 1..27: mol_type = other DNA
cagcagtataataattggcccatcacc

SEQ ID NO: 48 - protein, 9 aa, synthetic construct
  REGION 1..9: note = Description of Artificial Sequence: Synthetic peptide
QQYNNWPIT

SEQ ID NO: 49 - DNA, 363 bp, synthetic construct
  misc_feature 1..363: note = Description of Artificial Sequence: Synthetic polynucleotide
  source 1..363: mol_type = other DNA
caggtgcagctgcaggagtcgggcccaggactggtgaagccttcacagaccctgtccctcacctgcactgtctctggttactccatcaacagtggtggtcatttctggagctggatccgccagcacccagggaagggcctggagtggattggggacatctattacagtgggaacacctactccattccgtccctcaagcgtcgaatttccatgtcagtagacacgtctaagaaccacttctccctgaaactgatctctgtgacggccgcggacacggccatttattactgtgcgagaaatagtgggggctatcttgatgcttttgatatctggggccaagggacaatggtcaccgtctcttca

SEQ ID NO: 50 - protein, 121 aa, synthetic construct
  REGION 1..121: note = Description of Artificial Sequence: Synthetic polypeptide
QVQLQESGPGLVKPSQTLSLTCTVSGYSINSGGHFWSWIRQHPGKGLEWIGDIYYSGNTYSIPSLKRRISMSVDTSKNHFSLKLISVTAADTAIYYCARNSGGYLDAFDIWGQGTMVTVSS

SEQ ID NO: 51 - DNA, 30 bp, synthetic construct
  misc_feature 1..30: note = Description of Artificial Sequence: Synthetic oligonucleotide
  source 1..30: mol_type = other DNA
ggttactccatcaacagtggtggtcatttc

SEQ ID NO: 52 - protein, 10 aa, synthetic construct
  REGION 1..10: note = Description of Artificial Sequence: Synthetic peptide
GYSINSGGHF

SEQ ID NO: 53 - DNA, 21 bp, synthetic construct
  misc_feature 1..21: note = Description of Artificial Sequence: Synthetic oligonucleotide
  source 1..21: mol_type = other DNA
atctattacagtgggaacacc

SEQ ID NO: 54 - protein, 7 aa, synthetic construct
  REGION 1..7: note = Description of Artificial Sequence: Synthetic peptide
IYYSGNT

SEQ ID NO: 55 - DNA, 39 bp, synthetic construct
  misc_feature 1..39: note = Description of Artificial Sequence: Synthetic oligonucleotide
  source 1..39: mol_type = other DNA
gcgagaaatagtgggggctatcttgatgcttttgatatc

SEQ ID NO: 56 - protein, 13 aa, synthetic construct
  REGION 1..13: note = Description of Artificial Sequence: Synthetic peptide
ARNSGGYLDAFDI

SEQ ID NO: 57 - DNA, 324 bp, synthetic construct
  misc_feature 1..324: note = Description of Artificial Sequence: Synthetic polynucleotide
  source 1..324: mol_type = other DNA
gacatccagatgacccagtctccatcctccctgtctgcatctgtaggagacagagtcaccatcacttgccgggcaagtcagagcattagcagctatttaaattggtatcagcagaaaccagggaaagcccctaagctcctgatctatgctgcatccagtttgcaaagtggggtcccgtcaaggttcagtggcagtggatctgggacagatttcactctcaccatcagcagtctgcaacctgaagattttgcaacttactactgtcaacagagttacagtacccctccgatcaccttcggccaagggacacgactggagattaaa

SEQ ID NO: 58 - protein, 108 aa, synthetic construct
  REGION 1..108: note = Description of Artificial Sequence: Synthetic polypeptide
DIQMTQSPSSLSASVGDRVTITCRASQSISSYLNWYQQKPGKAPKLLIYAASSLQSGVPSRFSGSGSGTDFTLTISSLQPEDFATYYCQQSYSTPPITFGQGTRLEIK

SEQ ID NO: 59 - DNA, 18 bp, synthetic construct
  misc_feature 1..18: note = Description of Artificial Sequence: Synthetic oligonucleotide
  source 1..18: mol_type = other DNA
cagagcattagcagctat

SEQ ID NO: 60 - protein, 6 aa, synthetic construct
  REGION 1..6: note = Description of Artificial Sequence: Synthetic peptide
QSISSY

SEQ ID NO: 61-62 - skipped (2 entries)

SEQ ID NO: 63 - DNA, 30 bp, synthetic construct; identical to SEQ ID NO: 15
  misc_feature 1..30: note = Description of Artificial Sequence: Synthetic oligonucleotide
  source 1..30: mol_type = other DNA

SEQ ID NO: 64 - protein, 10 aa, synthetic construct
  REGION 1..10: note = Description of Artificial Sequence: Synthetic peptide
QQSYSTPPIT

SEQ ID NO: 65 - DNA, 387 bp, synthetic construct
  misc_feature 1..387: note = Description of Artificial Sequence: Synthetic polynucleotide
  source 1..387: mol_type = other DNA
gaggtgcagctggtggagtctgggggaggcttggtacagccgggggggtccctgagactctcctgtgcaacctctggattcaccttcagtaactacgacttccactgggtccgccaaattagaggacaaggtctggagtgggtctctactattgacactgctggtgacacatacttttcaggctccgtgaagggccgcttcaccatctccagagacactgccaaaacctccttgtatcttcaaatgaacagcctgagagccggggacacggctgtgtattactgtgcaagagcccctcgttatgatagtactggtaactactacaattactattcctatttcggcctggacgtctggggccaagggaccacggtcaccgtctcctca

SEQ ID NO: 66 - protein, 129 aa, synthetic construct
  REGION 1..129: note = Description of Artificial Sequence: Synthetic polypeptide
EVQLVESGGGLVQPGGSLRLSCATSGFTFSNYDFHWVRQIRGQGLEWVSTIDTAGDTYFSGSVKGRFTISRDTAKTSLYLQMNSLRAGDTAVYYCARAPRYDSTGNYYNYYSYFGLDVWGQGTTVTVSS

SEQ ID NO: 67 - DNA, 24 bp, synthetic construct
  misc_feature 1..24: note = Description of Artificial Sequence: Synthetic oligonucleotide
  source 1..24: mol_type = other DNA
ggattcaccttcagtaactacgac

SEQ ID NO: 68 - protein, 8 aa, synthetic construct
  REGION 1..8: note = Description of Artificial Sequence: Synthetic peptide
GFTFSNYD

SEQ ID NO: 69 - DNA, 21 bp, synthetic construct
  misc_feature 1..21: note = Description of Artificial Sequence: Synthetic oligonucleotide
  source 1..21: mol_type = other DNA
attgacactgctggtgacaca

SEQ ID NO: 70 - protein, 7 aa, synthetic construct
  REGION 1..7: note = Description of Artificial Sequence: Synthetic peptide
IDTAGDT

SEQ ID NO: 71 - DNA, 69 bp, synthetic construct
  misc_feature 1..69: note = Description of Artificial Sequence: Synthetic oligonucleotide
  source 1..69: mol_type = other DNA
gcaagagcccctcgttatgatagtactggtaactactacaattactattcctatttcggcctggacgtc

SEQ ID NO: 72 - protein, 23 aa, synthetic construct
  REGION 1..23: note = Description of Artificial Sequence: Synthetic peptide
ARAPRYDSTGNYYNYYSYFGLDV

SEQ ID NO: 73 - DNA, 375 bp, synthetic construct
  misc_feature 1..375: note = Description of Artificial Sequence: Synthetic polynucleotide
  source 1..375: mol_type = other DNA
caggtccagctggtacagtctggggctgaggtgaagaagcctggggcctcagtgaaggtctcctgcaaggtttccggatacaccctcactgaattatccatgcactgggtgcgacaggctcctggaaaagggcttgagtggatgggaagttttgatcctgaagatgatgaaacaatctacgcacagaagttccagggcagagtcaccatgaccgaggacacatctacagacacagcctacatggacctgagcagcctaagatctgaggacacggccgtgtattactgttcaatagaggaagttcgttggcggggatcggactactactacgttatggacgtctggggccaagggaccacggtcaccgtctcctca

SEQ ID NO: 74 - protein, 125 aa, synthetic construct
  REGION 1..125: note = Description of Artificial Sequence: Synthetic polypeptide
QVQLVQSGAEVKKPGASVKVSCKVSGYTLTELSMHWVRQAPGKGLEWMGSFDPEDDETIYAQKFQGRVTMTEDTSTDTAYMDLSSLRSEDTAVYYCSIEEVRWRGSDYYYVMDVWGQGTTVTVSS

SEQ ID NO: 75 - DNA, 24 bp, synthetic construct
  misc_feature 1..24: note = Description of Artificial Sequence: Synthetic oligonucleotide
  source 1..24: mol_type = other DNA
ggatacaccctcactgaattatcc

SEQ ID NO: 76 - protein, 8 aa, synthetic construct
  REGION 1..8: note = Description of Artificial Sequence: Synthetic peptide
GYTLTELS

SEQ ID NO: 77 - DNA, 24 bp, synthetic construct
  misc_feature 1..24: note = Description of Artificial Sequence: Synthetic oligonucleotide
  source 1..24: mol_type = other DNA
tttgatcctgaagatgatgaaaca

SEQ ID NO: 78 - protein, 8 aa, synthetic construct
  REGION 1..8: note = Description of Artificial Sequence: Synthetic peptide
FDPEDDET

SEQ ID NO: 79 - DNA, 54 bp, synthetic construct
  misc_feature 1..54: note = Description of Artificial Sequence: Synthetic oligonucleotide
  source 1..54: mol_type = other DNA
tcaatagaggaagttcgttggcggggatcggactactactacgttatggacgtc

SEQ ID NO: 80 - protein, 18 aa, synthetic construct
  REGION 1..18: note = Description of Artificial Sequence: Synthetic peptide
SIEEVRWRGSDYYYVMDV

SEQ ID NO: 81 - DNA, 372 bp, synthetic construct
  misc_feature 1..372: note = Description of Artificial Sequence: Synthetic polynucleotide
  source 1..372: mol_type = other DNA
caggtgcagctggtgcagtctggggctgaggtgaagaagcctgggtcctcggtgaaggtctcctgcagggcttctggaggcaccttcagcagatttgctatcggctgggtgcgacaggcccctggacaagggcttgagtggatgggagggatcatccctatctttggtacagcaagctacgcacagaagttccagggcagagtcacgattaccacggacgaatccacgagcacagcctacatggagttgcgaagcctgagatctgaggacacggccgtatattactgtacgagagaaggtataactggtcgaggctactactactacggtatggacgtctggggccaagggaccacggtcaccgtctcctca

SEQ ID NO: 82 - protein, 124 aa, synthetic construct
  REGION 1..124: note = Description of Artificial Sequence: Synthetic polypeptide
QVQLVQSGAEVKKPGSSVKVSCRASGGTFSRFAIGWVRQAPGQGLEWMGGIIPIFGTASYAQKFQGRVTITTDESTSTAYMELRSLRSEDTAVYYCTREGITGRGYYYYGMDVWGQGTTVTVSS

SEQ ID NO: 83 - DNA, 24 bp, synthetic construct
  misc_feature 1..24: note = Description of Artificial Sequence: Synthetic oligonucleotide
  source 1..24: mol_type = other DNA
ggaggcaccttcagcagatttgct

SEQ ID NO: 84 - protein, 8 aa, synthetic construct
  REGION 1..8: note = Description of Artificial Sequence: Synthetic peptide
GGTFSRFA

SEQ ID NO: 85 - DNA, 24 bp, synthetic construct
  misc_feature 1..24: note = Description of Artificial Sequence: Synthetic oligonucleotide
  source 1..24: mol_type = other DNA
atcatccctatctttggtacagca

SEQ ID NO: 86 - protein, 8 aa, synthetic construct
  REGION 1..8: note = Description of Artificial Sequence: Synthetic peptide
IIPIFGTA

SEQ ID NO: 87 - DNA, 51 bp, synthetic construct
  misc_feature 1..51: note = Description of Artificial Sequence: Synthetic oligonucleotide
  source 1..51: mol_type = other DNA
acgagagaaggtataactggtcgaggctactactactacggtatggacgtc

SEQ ID NO: 88 - protein, 17 aa, synthetic construct
  REGION 1..17: note = Description of Artificial Sequence: Synthetic peptide
TREGITGRGYYYYGMDV

SEQ ID NO: 89 - DNA, 357 bp, synthetic construct
  misc_feature 1..357: note = Description of Artificial Sequence: Synthetic polynucleotide
  source 1..357: mol_type = other DNA
caggtgcagctgcaggagtcgggcccaggactggtgaagccttcggagaccctgtccctcacctgcactgtctctggtggctccatcagtatttactactggacctggatccggcagcccccagggaagggactggagtggattgggaatatcttttacagtgggagcaccaactacaacccctccctcaagagtcgagtcaccatatcagtagacacgtccaagaatcagttttccctgaagttgagctctgtgaccgctgcggacacggccgtgtattactgtgcgagagagagactggggcgttacgatgcttttgataattggggccaagggacaatggtcaccgtctcttca

SEQ ID NO: 90 - protein, 119 aa, synthetic construct
  REGION 1..119: note = Description of Artificial Sequence: Synthetic polypeptide
QVQLQESGPGLVKPSETLSLTCTVSGGSISIYYWTWIRQPPGKGLEWIGNIFYSGSTNYNPSLKSRVTISVDTSKNQFSLKLSSVTAADTAVYYCARERLGRYDAFDNWGQGTMVTVSS

SEQ ID NO: 91 - DNA, 24 bp, synthetic construct
  misc_feature 1..24: note = Description of Artificial Sequence: Synthetic oligonucleotide
  source 1..24: mol_type = other DNA
ggtggctccatcagtatttactac

SEQ ID NO: 92 - protein, 8 aa, synthetic construct
  REGION 1..8: note = Description of Artificial Sequence: Synthetic peptide
GGSISIYY

SEQ ID NO: 93 - DNA, 21 bp, synthetic construct
  misc_feature 1..21: note = Description of Artificial Sequence: Synthetic oligonucleotide
  source 1..21: mol_type = other DNA
atcttttacagtgggagcacc

SEQ ID NO: 94 - protein, 7 aa, synthetic construct
  REGION 1..7: note = Description of Artificial Sequence: Synthetic peptide
IFYSGST

SEQ ID NO: 95 - DNA, 39 bp, synthetic construct
  misc_feature 1..39: note = Description of Artificial Sequence: Synthetic oligonucleotide
  source 1..39: mol_type = other DNA
gcgagagagagactggggcgttacgatgcttttgataat

SEQ ID NO: 96 - protein, 13 aa, synthetic construct
  REGION 1..13: note = Description of Artificial Sequence: Synthetic peptide
ARERLGRYDAFDN

SEQ ID NO: 97 - DNA, 366 bp, synthetic construct
  misc_feature 1..366: note = Description of Artificial Sequence: Synthetic polynucleotide
  source 1..366: mol_type = other DNA
gaggtgcagctggtggagtctgggggaggcttggtacagcctggggggtccctgagactctcctgtgcagcctctagattcacctttagtagctatgccatgagttgggtccgccaggctccagggaaggggctggagtgggtctcacttattagtggtagtggtggtaggacatggtacgcagactccgtgaagggccggttcaccatctccagagacaattccaagaacacgctgtttctgcaaatgaacagcctgagagccgaggacacggccgtctattactgtgcgaaagaaggggggatttttggagtggttaccttctttgactactggggccagggaaccctggtcaccgtctcctca

SEQ ID NO: 98 - protein, 122 aa, synthetic construct
  REGION 1..122: note = Description of Artificial Sequence: Synthetic polypeptide
EVQLVESGGGLVQPGGSLRLSCAASRFTFSSYAMSWVRQAPGKGLEWVSLISGSGGRTWYADSVKGRFTISRDNSKNTLFLQMNSLRAEDTAVYYCAKEGGIFGVVTFFDYWGQGTLVTVSS

SEQ ID NO: 99 - DNA, 24 bp, synthetic construct
  misc_feature 1..24: note = Description of Artificial Sequence: Synthetic oligonucleotide
  source 1..24: mol_type = other DNA
agattcacctttagtagctatgcc

SEQ ID NO: 100 - protein, 8 aa, synthetic construct
  REGION 1..8: note = Description of Artificial Sequence: Synthetic peptide
RFTFSSYA

SEQ ID NO: 101 - DNA, 24 bp, synthetic construct
  misc_feature 1..24: note = Description of Artificial Sequence: Synthetic oligonucleotide
  source 1..24: mol_type = other DNA
attagtggtagtggtggtaggaca

SEQ ID NO: 102 - protein, 8 aa, synthetic construct
  REGION 1..8: note = Description of Artificial Sequence: Synthetic peptide
ISGSGGRT

SEQ ID NO: 103 - DNA, 45 bp, synthetic construct
  misc_feature 1..45: note = Description of Artificial Sequence: Synthetic oligonucleotide
  source 1..45: mol_type = other DNA
gcgaaagaaggggggatttttggagtggttaccttctttgactac

SEQ ID NO: 104 - protein, 15 aa, synthetic construct
  REGION 1..15: note = Description of Artificial Sequence: Synthetic peptide
AKEGGIFGVVTFFDY

SEQ ID NO: 105 - DNA, 360 bp, synthetic construct
  misc_feature 1..360: note = Description of Artificial Sequence: Synthetic polynucleotide
  source 1..360: mol_type = other DNA
gaggtgcagctggtggagtctgggggaggcttggtacagcctggggggtccctgagactctcctgtgcagtctctggattcacctttagcagctatgccatgagctgggtccgccaggctccagggaaggggctggagtgggtctcagttattagtggtagtggtgatttcacataccacgcagactccgtgaagggccggttcaccatctccagagacaattccaagtccacgctgtatctgcaattgaacagcctgagagccgaggacacggccgtatattactgtgcgaaaaagggcttacgatattttgactggtacgactactggggccagggaaccctggtcaccgtctcctca

SEQ ID NO: 106 - protein, 120 aa, synthetic construct
  REGION 1..120: note = Description of Artificial Sequence: Synthetic polypeptide
EVQLVESGGGLVQPGGSLRLSCAVSGFTFSSYAMSWVRQAPGKGLEWVSVISGSGDFTYHADSVKGRFTISRDNSKSTLYLQLNSLRAEDTAVYYCAKKGLRYFDWYDYWGQGTLVTVSS

SEQ ID NO: 107 - DNA, 24 bp, synthetic construct
  misc_feature 1..24: note = Description of Artificial Sequence: Synthetic oligonucleotide
  source 1..24: mol_type = other DNA
ggattcacctttagcagctatgcc

SEQ ID NO: 108 - protein, 8 aa, synthetic construct
  REGION 1..8: note = Description of Artificial Sequence: Synthetic peptide
GFTFSSYA

SEQ ID NO: 109 - DNA, 24 bp, synthetic construct
  misc_feature 1..24: note = Description of Artificial Sequence: Synthetic oligonucleotide
  source 1..24: mol_type = other DNA
attagtggtagtggtgatttcaca

SEQ ID NO: 110 - protein, 8 aa, synthetic construct
  REGION 1..8: note = Description of Artificial Sequence: Synthetic peptide
ISGSGDFT

SEQ ID NO: 111 - DNA, 39 bp, synthetic construct
  misc_feature 1..39: note = Description of Artificial Sequence: Synthetic oligonucleotide
  source 1..39: mol_type = other DNA
gcgaaaaagggcttacgatattttgactggtacgactac

SEQ ID NO: 112 - protein, 13 aa, synthetic construct
  REGION 1..13: note = Description of Artificial Sequence: Synthetic peptide
AKKGLRYFDWYDY

SEQ ID NO: 113 - DNA, 324 bp, synthetic construct
  misc_feature 1..324: note = Description of Artificial Sequence: Synthetic polynucleotide
  source 1..324: mol_type = other DNA
gaaatagttttgacacagagtcccggcacactgtcactctctcccggggaaagagccaccttgtcatgtagagcaagtcagtcagtctctagctcttatctcgcctggtaccagcagaagccgggacaggcccctagactgctgatctacggggcaagttccagggccaccggaatccccgaccggttcagtggaagcggaagcggaaccgattttactttgacgatttctagactggagccagaggatttcgccgtttactattgtcaacagtacggaagcagcccgtggacgtttggccagggcacgaaggtagaaatcaag

SEQ ID NO: 114 - protein, 108 aa, synthetic construct
  REGION 1..108: note = Description of Artificial Sequence: Synthetic polypeptide
EIVLTQSPGTLSLSPGERATLSCRASQSVSSSYLAWYQQKPGQAPRLLIYGASSRATGIPDRFSGSGSGTDFTLTISRLEPEDFAVYYCQQYGSSPWTFGQGTKVEIK

SEQ ID NO: 115 - DNA, 36 bp, synthetic construct
  misc_feature 1..36: note = Description of Artificial Sequence: Synthetic oligonucleotide
  source 1..36: mol_type = other DNA
agagcaagtcagtcagtctctagctcttatctcgcc

SEQ ID NO: 116 - protein, 12 aa, synthetic construct
  REGION 1..12: note = Description of Artificial Sequence: Synthetic peptide
RASQSVSSSYLA

SEQ ID NO: 117 - DNA, 21 bp, synthetic construct
  misc_feature 1..21: note = Description of Artificial Sequence: Synthetic oligonucleotide
  source 1..21: mol_type = other DNA
ggggcaagttccagggccacc

SEQ ID NO: 118 - protein, 7 aa, synthetic construct
  REGION 1..7: note = Description of Artificial Sequence: Synthetic peptide
GASSRAT

SEQ ID NO: 119 - DNA, 27 bp, synthetic construct
  misc_feature 1..27: note = Description of Artificial Sequence: Synthetic oligonucleotide
  source 1..27: mol_type = other DNA
caacagtacggaagcagcccgtggacg

SEQ ID NO: 120 - protein, 9 aa, synthetic construct
  REGION 1..9: note = Description of Artificial Sequence: Synthetic peptide
QQYGSSPWT

SEQ ID NO: 121 - DNA, 375 bp, synthetic construct
  misc_feature 1..375: note = Description of Artificial Sequence: Synthetic polynucleotide
  source 1..375: mol_type = other DNA
caggtgcagctgcaggagtcgggcccaggactggtgaagccttcggagaccctgtccctcacctgcactgtctctggtggctccatcagtagttactactggacctggatccggcagaccccagggaagggactggagtggattgggtatatttattacagtgggagcaccaactacaacccctccctcaagagtcgagtcaccatatcagtagacacgtccaagaaccagttctccctgaagctgaggtctgtggccgctgcggacacggccgtttattactgtgcgagagggacttactaccgtgatagtagtggaaaatatttcaactggttcgacccctggggccagggaaccctggtcaccgtctcctca

SEQ ID NO: 122 - protein, 125 aa, synthetic construct
  REGION 1..125: note = Description of Artificial Sequence: Synthetic polypeptide
QVQLQESGPGLVKPSETLSLTCTVSGGSISSYYWTWIRQTPGKGLEWIGYIYYSGSTNYNPSLKSRVTISVDTSKNQFSLKLRSVAAADTAVYYCARGTYYRDSSGKYFNWFDPWGQGTLVTVSS

SEQ ID NO: 123 - DNA, 24 bp, synthetic construct
  misc_feature 1..24: note = Description of Artificial Sequence: Synthetic oligonucleotide
  source 1..24: mol_type = other DNA
ggtggctccatcagtagttactac

SEQ ID NO: 124 - protein, 8 aa, synthetic construct
  REGION 1..8: note = Description of Artificial Sequence: Synthetic peptide
GGSISSYY

SEQ ID NO: 125 - DNA, 21 bp, synthetic construct
  misc_feature 1..21: note = Description of Artificial Sequence: Synthetic oligonucleotide
  source 1..21: mol_type = other DNA
atttattacagtgggagcacc

SEQ ID NO: 126 - protein, 7 aa, synthetic construct
  REGION 1..7: note = Description of Artificial Sequence: Synthetic peptide
IYYSGST

SEQ ID NO: 127 - DNA, 57 bp, synthetic construct
  misc_feature 1..57: note = Description of Artificial Sequence: Synthetic oligonucleotide
  source 1..57: mol_type = other DNA
gcgagagggacttactaccgtgatagtagtggaaaatatttcaactggttcgacccc

SEQ ID NO: 128 - protein, 19 aa, synthetic construct
  REGION 1..19: note = Description of Artificial Sequence: Synthetic peptide
ARGTYYRDSSGKYFNWFDP

SEQ ID NO: 129 - DNA, 321 bp, synthetic construct
  misc_feature 1..321: note = Description of Artificial Sequence: Synthetic polynucleotide
  source 1..321: mol_type = other DNA
gacatccagatgacccagtctccatcttccgtgtctgcatctgtaggagacagagtcaccatcacttgtcgggcgagtcaggatattagcaactggttagcctggtatcagcagaaaccagggaaagcccctaagctcctgatctatgctgcatccagtttgcaaagtggggtcccatccaggttcagtggtagtggatctgggacagatttcactctctccatcagcagcctgcagtctgaagattttgcaacttactattgtcaacaggctaaaggtttccctcggacgttcggccaagggaccaaggtggaaatcaaa

SEQ ID NO: 130 - protein, 107 aa, synthetic construct
  REGION 1..107: note = Description of Artificial Sequence: Synthetic polypeptide
DIQMTQSPSSVSASVGDRVTITCRASQDISNWLAWYQQKPGKAPKLLIYAASSLQSGVPSRFSGSGSGTDFTLSISSLQSEDFATYYCQQAKGFPRTFGQGTKVEIK

SEQ ID NO: 131 - DNA, 18 bp, synthetic construct
  misc_feature 1..18: note = Description of Artificial Sequence: Synthetic oligonucleotide
  source 1..18: mol_type = other DNA
caggatattagcaactgg

SEQ ID NO: 132 - protein, 6 aa, synthetic construct
  REGION 1..6: note = Description of Artificial Sequence: Synthetic peptide
QDISNW

SEQ ID NO: 133-134 - skipped (2 entries)

SEQ ID NO: 135 - DNA, 27 bp, synthetic construct
  misc_feature 1..27: note = Description of Artificial Sequence: Synthetic oligonucleotide
  source 1..27: mol_type = other DNA
caacaggctaaaggtttccctcggacg

SEQ ID NO: 136 - protein, 9 aa, synthetic construct
  REGION 1..9: note = Description of Artificial Sequence: Synthetic peptide
QQAKGFPRT

SEQ ID NO: 137 - DNA, 375 bp, synthetic construct
  misc_feature 1..375: note = Description of Artificial Sequence: Synthetic polynucleotide
  source 1..375: mol_type = other DNA
caggtgcagctggtggagtctgggggaggcgtggtccagcctgggaggtccctgagactctcctgtgcagcctctggattcaccttcagtagctttggcatgcactgggtccgccaggctccaggcaaggggctggagtgggtgtcacttatatcatatgatggtgataataaatactatgtagactccgtgaagggccgattcaccatctccagagacaattccgagaacacgctgtatctgcaaatgaacaacctgcgacctgaggacacggctttctattactgtgcgaaagatggatttactagtggctggtacggctcctacaccggtttggacgtctggggccaagggaccacggtcaccgtctcctca

SEQ ID NO: 138 - protein, 125 aa, synthetic construct
  REGION 1..125: note = Description of Artificial Sequence: Synthetic polypeptide
QVQLVESGGGVVQPGRSLRLSCAASGFTFSSFGMHWVRQAPGKGLEWVSLISYDGDNKYYVDSVKGRFTISRDNSENTLYLQMNNLRPEDTAFYYCAKDGFTSGWYGSYTGLDVWGQGTTVTVSS

SEQ ID NO: 139 - DNA, 24 bp, synthetic construct
  misc_feature 1..24: note = Description of Artificial Sequence: Synthetic oligonucleotide
  source 1..24: mol_type = other DNA
ggattcaccttcagtagctttggc

SEQ ID NO: 140 - protein, 8 aa, synthetic construct
  REGION 1..8: note = Description of Artificial Sequence: Synthetic peptide
GFTFSSFG

SEQ ID NO: 141 - DNA, 24 bp, synthetic construct
  misc_feature 1..24: note = Description of Artificial Sequence: Synthetic oligonucleotide
  source 1..24: mol_type = other DNA
atatcatatgatggtgataataaa

SEQ ID NO: 142 - protein, 8 aa, synthetic construct
  REGION 1..8: note = Description of Artificial Sequence: Synthetic peptide
ISYDGDNK

SEQ ID NO: 143 - DNA, 54 bp, synthetic construct
  misc_feature 1..54: note = Description of Artificial Sequence: Synthetic oligonucleotide
  source 1..54: mol_type = other DNA
gcgaaagatggatttactagtggctggtacggctcctacaccggtttggacgtc

SEQ ID NO: 144 - protein, 18 aa, synthetic construct
  REGION 1..18: note = Description of Artificial Sequence: Synthetic peptide
AKDGFTSGWYGSYTGLDV

SEQ ID NO: 145 - DNA, 321 bp, synthetic construct
  misc_feature 1..321: note = Description of Artificial Sequence: Synthetic polynucleotide
  source 1..321: mol_type = other DNA
gacatccagatgacccagtctccatcctccctgtctgcatctgtaggagacagagtcaccatcacttgccgggcaagtcagggcattagaaatgatttaggctggtatcagcagaatccagggagagcccctaagcgcctgatctatgctgcatccagtttgcaaagtggggtcccatcaaggttcagcggcagtggatctgggacagaattcactctcacaatcagcagcctgcagcctgaagattttgcaacttattactgtcttcagtataatagttaccctcggacgttcggccaagggaccaaggtggaaatcaaa

SEQ ID NO: 146 - protein, 107 aa, synthetic construct
  REGION 1..107: note = Description of Artificial Sequence: Synthetic polypeptide
DIQMTQSPSSLSASVGDRVTITCRASQGIRNDLGWYQQNPGRAPKRLIYAASSLQSGVPSRFSGSGSGTEFTLTISSLQPEDFATYYCLQYNSYPRTFGQGTKVEIK

SEQ ID NO: 147 - DNA, 18 bp, synthetic construct
  misc_feature 1..18: note = Description of Artificial Sequence: Synthetic oligonucleotide
  source 1..18: mol_type = other DNA
cagggcattagaaatgat

SEQ ID NO: 148 - protein, 6 aa, synthetic construct
  REGION 1..6: note = Description of Artificial Sequence: Synthetic peptide
QGIRND

SEQ ID NO: 149-150 - skipped (2 entries)

SEQ ID NO: 151 - DNA, 27 bp, synthetic construct
  misc_feature 1..27: note = Description of Artificial Sequence: Synthetic oligonucleotide
  source 1..27: mol_type = other DNA
cttcagtataatagttaccctcggacg

SEQ ID NO: 152 - protein, 9 aa, synthetic construct
  REGION 1..9: note = Description of Artificial Sequence: Synthetic peptide
LQYNSYPRT

SEQ ID NO: 153 - DNA, 360 bp, synthetic construct
  misc_feature 1..360: note = Description of Artificial Sequence: Synthetic polynucleotide
  source 1..360: mol_type = other DNA
gaggtgcagctggtggagtctgggggaggctgggtacagcctggggggtccctgagactctcctgtgcagcctctggattcacattcagtaacttcgacatgcactgggtccgccaagctgcaggaaaaggtctggagtgggtctcaattattgatactggtggtgacacatactatccgggctccgtgaagggccgattcaccatatccagagaagatgccaagaactccttctatcttcaaatgaacagcctgagagccggggacacggctatatattactgtgtaagaggggggtataccagtggctgggactactttgactactggggccagggaaccctggtcaccgtctcctca

SEQ ID NO: 154 - protein, 120 aa, synthetic construct
  REGION 1..120: note = Description of Artificial Sequence: Synthetic polypeptide
EVQLVESGGGWVQPGGSLRLSCAASGFTFSNFDMHWVRQAAGKGLEWVSIIDTGGDTYYPGSVKGRFTISREDAKNSFYLQMNSLRAGDTAIYYCVRGGYTSGWDYFDYWGQGTLVTVSS

SEQ ID NO: 155 - DNA, 24 bp, synthetic construct
  misc_feature 1..24: note = Description of Artificial Sequence: Synthetic oligonucleotide
  source 1..24: mol_type = other DNA
ggattcacattcagtaacttcgac

SEQ ID NO: 156 - protein, 8 aa, synthetic construct
  REGION 1..8: note = Description of Artificial Sequence: Synthetic peptide
GFTFSNFD

SEQ ID NO: 157 - DNA, 21 bp, synthetic construct
  misc_feature 1..21: note = Description of Artificial Sequence: Synthetic oligonucleotide
  source 1..21: mol_type = other DNA
attgatactggtggtgacaca

SEQ ID NO: 158 - protein, 7 aa, synthetic construct
  REGION 1..7: note = Description of Artificial Sequence: Synthetic peptide
IDTGGDT

SEQ ID NO: 159 - DNA, 42 bp, synthetic construct
  misc_feature 1..42: note = Description of Artificial Sequence: Synthetic oligonucleotide
  source 1..42: mol_type = other DNA
gtaagaggggggtataccagtggctgggactactttgactac

SEQ ID NO: 160 - protein, 14 aa, synthetic construct
  REGION 1..14: note = Description of Artificial Sequence: Synthetic peptide
VRGGYTSGWDYFDY

SEQ ID NO: 161 - DNA, 321 bp, synthetic construct
  misc_feature 1..321: note = Description of Artificial Sequence: Synthetic polynucleotide
  source 1..321: mol_type = other DNA
gacatccagttgacccagtctccatccttcctgtctgcatctgtgggagacagagtcaccatcacttgctgggccagtcagggcattagcagttatttagcctggtatcagcaaaaaccagggaaagcccctaagctcctgatctatgctgcatccactttgcaaagtggggtcccatcaaggttcagcggcagtggatctgggacagaattcactctcacaatccgccgcctgcagcctgaagattttgcaagttattactgtcaacagcttaataattacccgtacacttttggccaggggaccaagctggagatcaaa

SEQ ID NO: 162 - protein, 107 aa, synthetic construct
  REGION 1..107: note = Description of Artificial Sequence: Synthetic polypeptide
DIQLTQSPSFLSASVGDRVTITCWASQGISSYLAWYQQKPGKAPKLLIYAASTLQSGVPSRFSGSGSGTEFTLTIRRLQPEDFASYYCQQLNNYPYTFGQGTKLEIK

SEQ ID NO: 163 - DNA, 18 bp, synthetic construct
  misc_feature 1..18: note = Description of Artificial Sequence: Synthetic oligonucleotide
  source 1..18: mol_type = other DNA
cagggcattagcagttat

SEQ ID NO: 164 - protein, 6 aa, synthetic construct
  REGION 1..6: note = Description of Artificial Sequence: Synthetic peptide
QGISSY

SEQ ID NO: 165-166 - skipped (2 entries)

SEQ ID NO: 167 - DNA, 27 bp, synthetic construct
  misc_feature 1..27: note = Description of Artificial Sequence: Synthetic oligonucleotide
  source 1..27: mol_type = other DNA
caacagcttaataattacccgtacact

SEQ ID NO: 168 - protein, 9 aa, synthetic construct
  REGION 1..9: note = Description of Artificial Sequence: Synthetic peptide
QQLNNYPYT

SEQ ID NO: 169 - DNA, 381 bp, synthetic construct
  misc_feature 1..381: note = Description of Artificial Sequence: Synthetic polynucleotide
  source 1..381: mol_type = other DNA
caggtgcagctggtggagtctgggggaggcgtggtccagcctgggaggtccctgagactctcctgtgcagcgtctggattcaccttcagtagctatggcatgcactgggtccgccaggctccaggcaaggggctggagtgggtggcagttatatggtatgatggaagtaataaatactatgcagactccgtgaagggccgattcaccatctccagagacaattccaagaacacgctgtatctgcaaatgaacagcctgagagccgaggacacggctgtgtattactgtgcgagagatggggtctacagtaactacggacgatactactactactacggtatggacgtctggggccaagggaccacggtcaccgtctcctca

SEQ ID NO: 170 - protein, 127 aa, synthetic construct
  REGION 1..127: note = Description of Artificial Sequence: Synthetic polypeptide
QVQLVESGGGVVQPGRSLRLSCAASGFTFSSYGMHWVRQAPGKGLEWVAVIWYDGSNKYYADSVKGRFTISRDNSKNTLYLQMNSLRAEDTAVYYCARDGVYSNYGRYYYYYGMDVWGQGTTVTVSS

SEQ ID NO: 171 - DNA, 24 bp, synthetic construct
  misc_feature 1..24: note = Description of Artificial Sequence: Synthetic oligonucleotide
  source 1..24: mol_type = other DNA
ggattcaccttcagtagctatggc

SEQ ID NO: 172 - protein, 8 aa, synthetic construct
  REGION 1..8: note = Description of Artificial Sequence: Synthetic peptide
GFTFSSYG

SEQ ID NO: 173 - DNA, 24 bp, synthetic construct
  misc_feature 1..24: note = Description of Artificial Sequence: Synthetic oligonucleotide
  source 1..24: mol_type = other DNA
atatggtatgatggaagtaataaa

SEQ ID NO: 174 - protein, 8 aa, synthetic construct
  REGION 1..8: note = Description of Artificial Sequence: Synthetic peptide
IWYDGSNK

SEQ ID NO: 175 - DNA, 60 bp, synthetic construct
  misc_feature 1..60: note = Description of Artificial Sequence: Synthetic oligonucleotide
  source 1..60: mol_type = other DNA
gcgagagatggggtctacagtaactacggacgatactactactactacggtatggacgtc

SEQ ID NO: 176 - protein, 20 aa, synthetic construct
  REGION 1..20: note = Description of Artificial Sequence: Synthetic peptide
ARDGVYSNYGRYYYYYGMDV

SEQ ID NO: 177 - DNA, 321 bp, synthetic construct
  misc_feature 1..321: note = Description of Artificial Sequence: Synthetic polynucleotide
  source 1..321: mol_type = other DNA
gacatccagatgacccagtctccatcctccctgtctgcatctgtaggagacagagtcaccatcacttgccgggcaagtcagagcatacgtagctttttaaattggtatcagcagaaaccagggaaagcccctaagttcctaatttctgctgcatccagtttgcaaagaggggtcccatctaggttcagtggcagtggatctgggacagatttcactctcaccatcagcagtctgcaacctgaggattcttcaacttactactgtcaacagagttacagtatcccggtcactttcggcggagggaccaaggtggagatcaaa

SEQ ID NO: 178 - protein, 107 aa, synthetic construct
  REGION 1..107: note = Description of Artificial Sequence: Synthetic polypeptide
DIQMTQSPSSLSASVGDRVTITCRASQSIRSFLNWYQQKPGKAPKFLISAASSLQRGVPSRFSGSGSGTDFTLTISSLQPEDSSTYYCQQSYSIPVTFGGGTKVEIK

SEQ ID NO: 179 - DNA, 18 bp, synthetic construct
  misc_feature 1..18: note = Description of Artificial Sequence: Synthetic oligonucleotide
  source 1..18: mol_type = other DNA
cagagcatacgtagcttt

SEQ ID NO: 180 - protein, 6 aa, synthetic construct
  REGION 1..6: note = Description of Artificial Sequence: Synthetic peptide
QSIRSF

SEQ ID NO: 181-182 - skipped (2 entries)

SEQ ID NO: 183 - DNA, 27 bp, synthetic construct
  misc_feature 1..27: note = Description of Artificial Sequence: Synthetic oligonucleotide
  source 1..27: mol_type = other DNA
caacagagttacagtatcccggtcact

SEQ ID NO: 184 - protein, 9 aa, synthetic construct
  REGION 1..9: note = Description of Artificial Sequence: Synthetic peptide
QQSYSIPVT

SEQ ID NO: 185 - DNA, 372 bp, synthetic construct
  misc_feature 1..372: note = Description of Artificial Sequence: Synthetic polynucleotide
  source 1..372: mol_type = other DNA
caggtacagctgcagcagtcaggtccaggactggtgaagccctcgcagaccctctcactcacctgtgccatctccggggacagtgtctctagcaacagtgctgcttggaactggatcaggcagtccccatcgagaggccttgagtggctgggaaggacatactacaggtccaagtggtataatgattatgtagtatctgtgaaaagtcgaataatcttcaacccagacacatccaagaaccagttctccctgcagctgaactctgtgactcccgaggacacggctgtgtattactgtgcaagagtgaggcaggattatagaagtggcccgtttgactactggggccagggaaccctggtcaccgtctcctca

SEQ ID NO: 186 - protein, 124 aa, synthetic construct
  REGION 1..124: note = Description of Artificial Sequence: Synthetic polypeptide
QVQLQQSGPGLVKPSQTLSLTCAISGDSVSSNSAAWNWIRQSPSRGLEWLGRTYYRSKWYNDYVVSVKSRIIFNPDTSKNQFSLQLNSVTPEDTAVYYCARVRQDYRSGPFDYWGQGTLVTVSS

SEQ ID NO: 187 - DNA, 30 bp, synthetic construct; identical to SEQ ID NO: 3
  misc_feature 1..30: note = Description of Artificial Sequence: Synthetic oligonucleotide
  source 1..30: mol_type = other DNA

SEQ ID NO: 188 - protein, 10 aa, synthetic construct
  REGION 1..10: note = Description of Artificial Sequence: Synthetic peptide
GDSVSSNSAA

SEQ ID NO: 189 - DNA, 27 bp, synthetic construct
  misc_feature 1..27: note = Description of Artificial Sequence: Synthetic oligonucleotide
  source 1..27: mol_type = other DNA
acatactacaggtccaagtggtataat

SEQ ID NO: 190 - protein, 9 aa, synthetic construct
  REGION 1..9: note = Description of Artificial Sequence: Synthetic peptide
TYYRSKWYN

SEQ ID NO: 191 - DNA, 42 bp, synthetic construct
  misc_feature 1..42: note = Description of Artificial Sequence: Synthetic oligonucleotide
  source 1..42: mol_type = other DNA
gcaagagtgaggcaggattatagaagtggcccgtttgactac

SEQ ID NO: 192 - protein, 14 aa, synthetic construct
  REGION 1..14: note = Description of Artificial Sequence: Synthetic peptide
ARVRQDYRSGPFDY

SEQ ID NO: 193 - DNA, 321 bp, synthetic construct
  misc_feature 1..321: note = Description of Artificial Sequence: Synthetic polynucleotide
  source 1..321: mol_type = other DNA
gaaatagtgatgacgcagtctccagtcaccctgtctgtgtctccaggggaaagagccaccctctcctgttgggccagtcagagtgttagcagcagcttagcctggtaccagcagaaacctggccaggctcccagactcctcatctatggtgcatccaccagggccactggtatcccagccaggttcagtggcagtgggtctgggacagggttcactctcaccatcagcagcctgcagtctgaagattttgcagtttattactgtcagcagtataataactggccattcactttcggccctgggaccaaagtggatatcaaa

SEQ ID NO: 194 - protein, 107 aa, synthetic construct
  REGION 1..107: note = Description of Artificial Sequence: Synthetic polypeptide
EIVMTQSPVTLSVSPGERATLSCWASQSVSSSLAWYQQKPGQAPRLLIYGASTRATGIPARFSGSGSGTGFTLTISSLQSEDFAVYYCQQYNNWPFTFGPGTKVDIK

SEQ ID NO: 195 - DNA, 18 bp, synthetic construct
  misc_feature 1..18: note = Description of Artificial Sequence: Synthetic oligonucleotide
  source 1..18: mol_type = other DNA
cagagtgttagcagcagc

SEQ ID NO: 196 - protein, 6 aa, synthetic construct
  REGION 1..6: note = Description of Artificial Sequence: Synthetic peptide
QSVSSS

SEQ ID NO: 197-198 - skipped (2 entries)

SEQ ID NO: 199 - DNA, 27 bp, synthetic construct
  misc_feature 1..27: note = Description of Artificial Sequence: Synthetic oligonucleotide
  source 1..27: mol_type = other DNA
cagcagtataataactggccattcact

SEQ ID NO: 200 - protein, 9 aa, synthetic construct
  REGION 1..9: note = Description of Artificial Sequence: Synthetic peptide
QQYNNWPFT

SEQ ID NO: 201 - DNA, 354 bp, synthetic construct
  misc_feature 1..354: note = Description of Artificial Sequence: Synthetic polynucleotide
  source 1..354: mol_type = other DNA
gaggtgcagctgttggagtctgggggaggcttggtacagcctggggggtccctgagactctcctgtgcagcctctggattcacctttagcagctatgccatgagctgggtccgccaggctccagggaaggggctggagtgggtctcagttattagtggtagtggtggtagcacatactacgcagactccgtgaagggccggttcaccatctccagagacaattccaagaacacgctgtatctgcaaatgaacagcctgagagccgaggacacggccgtatattactgtgcgaaagagcagtatagccggggctttgactactggggccagggaaccctggtcaccgtctcctca

SEQ ID NO: 202 - protein, 118 aa, synthetic construct
  REGION 1..118: note = Description of Artificial Sequence: Synthetic polypeptide
EVQLLESGGGLVQPGGSLRLSCAASGFTFSSYAMSWVRQAPGKGLEWVSVISGSGGSTYYADSVKGRFTISRDNSKNTLYLQMNSLRAEDTAVYYCAKEQYSRGFDYWGQGTLVTVSS

SEQ ID NO: 203 - DNA, 24 bp, synthetic construct
  misc_feature 1..24: note = Description of Artificial Sequence: Synthetic oligonucleotide
  source 1..24: mol_type = other DNA
ggattcacctttagcagctatgcc

SEQ ID NO: 204 - protein, 8 aa, synthetic construct
  REGION 1..8: note = Description of Artificial Sequence: Synthetic peptide
GFTFSSYA

SEQ ID NO: 205 - DNA, 24 bp, synthetic construct
  misc_feature 1..24: note = Description of Artificial Sequence: Synthetic oligonucleotide
  source 1..24: mol_type = other DNA
attagtggtagtggtggtagcaca

SEQ ID NO: 206 - protein, 8 aa, synthetic construct
  REGION 1..8: note = Description of Artificial Sequence: Synthetic peptide
ISGSGGST

SEQ ID NO: 207 - DNA, 33 bp, synthetic construct
  misc_feature 1..33: note = Description of Artificial Sequence: Synthetic oligonucleotide
  source 1..33: mol_type = other DNA
gcgaaagagcagtatagccggggctttgactac

SEQ ID NO: 208 - protein, 11 aa, synthetic construct
  REGION 1..11: note = Description of Artificial Sequence: Synthetic peptide
AKEQYSRGFDY

SEQ ID NO: 209 - DNA, 318 bp, synthetic construct
  misc_feature 1..318: note = Description of Artificial Sequence: Synthetic polynucleotide
  source 1..318: mol_type = other DNA
gacatccagatgacccagtctccttccaccctgtctgtatctgtaggagacagagtcaccatcacttgccgggccagtcagagtattagtagttggttggcctggtatcagcagaaaccagggaaagcccctaagctcctgatctataaggcgtctagtttagaaagtggggtcccatcaaggttcagcggcagtggatctgggacagaattcactctcaccatcagcagcctgcagcctgatgattttgcaacttattactgccaacagtataatagttattggacgttcggccaagggaccaaggtggaaatcaaa

SEQ ID NO: 210 - protein, 106 aa, synthetic construct
  REGION 1..106: note = Description of Artificial Sequence: Synthetic polypeptide
DIQMTQSPSTLSVSVGDRVTITCRASQSISSWLAWYQQKPGKAPKLLIYKASSLESGVPSRFSGSGSGTEFTLTISSLQPDDFATYYCQQYNSYWTFGQGTKVEIK

SEQ ID NO: 211 - DNA, 18 bp, synthetic construct
  misc_feature 1..18: note = Description of Artificial Sequence: Synthetic oligonucleotide
  source 1..18: mol_type = other DNA
cagagtattagtagttgg

SEQ ID NO: 212 - protein, 6 aa, synthetic construct
  REGION 1..6: note = Description of Artificial Sequence: Synthetic peptide
QSISSW

SEQ ID NO: 213-214 - skipped (2 entries)

SEQ ID NO: 215 - DNA, 24 bp, synthetic construct
  misc_feature 1..24: note = Description of Artificial Sequence: Synthetic oligonucleotide
  source 1..24: mol_type = other DNA
caacagtataatagttattggacg

SEQ ID NO: 216 - protein, 8 aa, synthetic construct
  REGION 1..8: note = Description of Artificial Sequence: Synthetic peptide
QQYNSYWT

SEQ ID NO: 217 - DNA, 345 bp, synthetic construct
  misc_feature 1..345: note = Description of Artificial Sequence: Synthetic polynucleotide
  source 1..345: mol_type = other DNA
caggtgcagctggtggagtctgggggaggcgtggtccagcctgggaggtccctgagactctcctgtgtagcctctggattcaccatcagtagctatggcatgaactgggtccgccaggctccaggcaaggggctggagtgggtggcagttatatcatatgatggaggtaataaatactctgtagactccgtgaagggccgattcaccatctccagagacaattccaagaatacgctgtatctgcaaatgaacagcctgagagctgaggactcggctgtttattactgtgcgagaggaaggtacttcgatctctggggccgtggcaccctggtcactgtctcctca

SEQ ID NO: 218 - protein, 115 aa, synthetic construct
  REGION 1..115: note = Description of Artificial Sequence: Synthetic polypeptide
QVQLVESGGGVVQPGRSLRLSCVASGFTISSYGMNWVRQAPGKGLEWVAVISYDGGNKYSVDSVKGRFTISRDNSKNTLYLQMNSLRAEDSAVYYCARGRYFDLWGRGTLVTVSS

SEQ ID NO: 219 - DNA, 24 bp, synthetic construct
  misc_feature 1..24: note = Description of Artificial Sequence: Synthetic oligonucleotide
  source 1..24: mol_type = other DNA
ggattcaccatcagtagctatggc

SEQ ID NO: 220 - protein, 8 aa, synthetic construct
  REGION 1..8: note = Description of Artificial Sequence: Synthetic peptide
GFTISSYG

SEQ ID NO: 221 - DNA, 24 bp, synthetic construct
  misc_feature 1..24: note = Description of Artificial Sequence: Synthetic oligonucleotide
  source 1..24: mol_type = other DNA
atatcatatgatggaggtaataaa

SEQ ID NO: 222 - protein, 8 aa, synthetic construct
  REGION 1..8: note = Description of Artificial Sequence: Synthetic peptide
ISYDGGNK

SEQ ID NO: 223 - DNA, 24 bp, synthetic construct
  misc_feature 1..24: note = Description of Artificial Sequence: Synthetic oligonucleotide
  source 1..24: mol_type = other DNA
gcgagaggaaggtacttcgatctc

SEQ ID NO: 224 - protein, 8 aa, synthetic construct
  REGION 1..8: note = Description of Artificial Sequence: Synthetic peptide
ARGRYFDL

SEQ ID NO: 225 - DNA, 321 bp, synthetic construct
  misc_feature 1..321: note = Description of Artificial Sequence: Synthetic polynucleotide
  source 1..321: mol_type = other DNA
gacatccagatgacccagtctccttccaccctgtctgcatctgtaggagacagagtcaccatcacttgccgggccagtcagagtattagtagctggttggcctggtatcagcagaaaccagggagagcccctaacctcctgatctctaaggcgtctagtttaaaaagtggggtcccatcaaggttcagcggcagtggatctgggacagaattcactctcaccgtcagcagcctgcagcctgatgattttgcaacttattactgccaacagtattatagttattcttacacttttggccaggggaccaagctggagatcaaa

SEQ ID NO: 226 - protein, 107 aa, synthetic construct
  REGION 1..107: note = Description of Artificial Sequence: Synthetic polypeptide
DIQMTQSPSTLSASVGDRVTITCRASQSISSWLAWYQQKPGRAPNLLISKASSLKSGVPSRFSGSGSGTEFTLTVSSLQPDDFATYYCQQYYSYSYTFGQGTKLEIK

SEQ ID NO: 227 - DNA, 18 bp, synthetic construct
  misc_feature 1..18: note = Description of Artificial Sequence: Synthetic oligonucleotide
  source 1..18: mol_type = other DNA
cagagtattagtagctgg

SEQ ID NO: 228 - protein, 6 aa, synthetic construct
  REGION 1..6: note = Description of Artificial Sequence: Synthetic peptide
QSISSW

SEQ ID NO: 229-230 - skipped (2 entries)

SEQ ID NO: 231 - DNA, 27 bp, synthetic construct
  misc_feature 1..27: note = Description of Artificial Sequence: Synthetic oligonucleotide
  source 1..27: mol_type = other DNA
caacagtattatagttattcttacact

SEQ ID NO: 232 - protein, 9 aa, synthetic construct
  REGION 1..9: note = Description of Artificial Sequence: Synthetic peptide
QQYYSYSYT

SEQ ID NO: 233 - DNA, 360 bp, synthetic construct
  misc_feature 1..360: note = Description of Artificial Sequence: Synthetic polynucleotide
  source 1..360: mol_type = other DNA
caggtgcagctgcaggagtcgggcccaggactggtgaagccttcacagaccctgtccctcacctgcactgtctctggtggctccatcagcagtggtggttactactggagctggatccgccagcacccagggaagggcctggagtggattgggtacatctattacagtgggagcacctactacaacccgtccctcaagagtcgagtcaccatatcagtagacacgtctaagaaccagttctccctgaagctgaactctgtgactgccgcggacacggccgtgtattactgtgcgagggacgacggtgactactacggtatggacgtctggggccaagggaccacggtcaccgtctcctca

SEQ ID NO: 234 - protein, 120 aa, synthetic construct
  REGION 1..120: note = Description of Artificial Sequence: Synthetic polypeptide
QVQLQESGPGLVKPSQTLSLTCTVSGGSISSGGYYWSWIRQHPGKGLEWIGYIYYSGSTYYNPSLKSRVTISVDTSKNQFSLKLNSVTAADTAVYYCARDDGDYYGMDVWGQGTTVTVSS

SEQ ID NO: 235 - DNA, 30 bp, synthetic construct
  misc_feature 1..30: note = Description of Artificial Sequence: Synthetic oligonucleotide
  source 1..30: mol_type = other DNA
ggtggctccatcagcagtggtggttactac

SEQ ID NO: 236 - protein, 10 aa, synthetic construct
  REGION 1..10: note = Description of Artificial Sequence: Synthetic peptide
GGSISSGGYY

SEQ ID NO: 237 - DNA, 21 bp, synthetic construct
  misc_feature 1..21: note = Description of Artificial Sequence: Synthetic oligonucleotide
  source 1..21: mol_type = other DNA
atctattacagtgggagcacc

SEQ ID NO: 238 - protein, 7 aa, synthetic construct
  REGION 1..7: note = Description of Artificial Sequence: Synthetic peptide
IYYSGST

SEQ ID NO: 239 - DNA, 36 bp, synthetic construct
  misc_feature 1..36: note = Description of Artificial Sequence: Synthetic oligonucleotide
  source 1..36: mol_type = other DNA
gcgagggacgacggtgactactacggtatggacgtc

SEQ ID NO: 240 - protein, 12 aa, synthetic construct
  REGION 1..12: note = Description of Artificial Sequence: Synthetic peptide
ARDDGDYYGMDV

SEQ ID NO: 241 - DNA, 324 bp, synthetic construct
  misc_feature 1..324: note = Description of Artificial Sequence: Synthetic polynucleotide
  source 1..324: mol_type = other DNA
gaaattgtgttgacacagtctccagccaccctgtctttgtctccaggggaaagagccaccctctcctgcagggccagtcagactgttagcagctacttagcctggtaccaacagaaacctggccaggctcccaggctcctcatctatgatgcatccaacagggccactggcatcccagccaggttcagtggcagtgggtctgggacagacttcactctcaccatcagcagcctagagcctgaagattttgcagtttattactgtcagcagcgtagcaactggcctccattcactttcggccctgggaccaaagtggatatcaaa

SEQ ID NO: 242 - protein, 108 aa, synthetic construct
  REGION 1..108: note = Description of Artificial Sequence: Synthetic polypeptide
EIVLTQSPATLSLSPGERATLSCRASQTVSSYLAWYQQKPGQAPRLLIYDASNRATGIPARFSGSGSGTDFTLTISSLEPEDFAVYYCQQRSNWPPFTFGPGTKVDIK

SEQ ID NO: 243 - DNA, 18 bp, synthetic construct
  misc_feature 1..18: note = Description of Artificial Sequence: Synthetic oligonucleotide
  source 1..18: mol_type = other DNA
cagactgttagcagctac

SEQ ID NO: 244 - protein, 6 aa, synthetic construct
  REGION 1..6: note = Description of Artificial Sequence: Synthetic peptide
QTVSSY

SEQ ID NO: 245-246 - skipped (2 entries)

SEQ ID NO: 247 - DNA, 30 bp, synthetic construct
  misc_feature 1..30: note = Description of Artificial Sequence: Synthetic oligonucleotide
  source 1..30: mol_type = other DNA
cagcagcgtagcaactggcctccattcact

SEQ ID NO: 248 - protein, 10 aa, synthetic construct
  REGION 1..10: note = Description of Artificial Sequence: Synthetic peptide
QQRSNWPPFT

SEQ ID NO: 249 - DNA, 399 bp, synthetic construct
  misc_feature 1..399: note = Description of Artificial Sequence: Synthetic polynucleotide
  source 1..399: mol_type = other DNA
caggtacagctgcagcagtcaggtccaggactggtgaagccctcgcagaccctctcactcacctgtgccatctccggggacagtgtctctagtaatcgtgctgcttggaactggatcaggcagtccccatcgagaggccttcagtggctgggaaggacatactataggtccaagtggtataatgattatgcagtatctctgagaagtcgaataaccatcaacccagtcacatccaagaaccaggtcgccctgcatatgaactctgtgactcccgaggacacggctgtgtattactgtgcaagggcgggaattgttgtagtgccaggtccggaaactttctactattatgatcacggtttggacgtctggggccaagggaccacggtcaccgtctcctca

SEQ ID NO: 250 - protein, 133 aa, synthetic construct
  REGION 1..133: note = Description of Artificial Sequence: Synthetic polypeptide
QVQLQQSGPGLVKPSQTLSLTCAISGDSVSSNRAAWNWIRQSPSRGLQWLGRTYYRSKWYNDYAVSLRSRITINPVTSKNQVALHMNSVTPEDTAVYYCARAGIVVVPGPETFYYYDHGLDVWGQGTTVTVSS

SEQ ID NO: 251 - DNA, 30 bp, synthetic construct
  misc_feature 1..30: note = Description of Artificial Sequence: Synthetic oligonucleotide
  source 1..30: mol_type = other DNA
ggggacagtgtctctagtaatcgtgctgct

SEQ ID NO: 252 - protein, 10 aa, synthetic construct
  REGION 1..10: note = Description of Artificial Sequence: Synthetic peptide
GDSVSSNRAA

SEQ ID NO: 253 - DNA, 27 bp, synthetic construct
  misc_feature 1..27: note = Description of Artificial Sequence: Synthetic oligonucleotide
  source 1..27: mol_type = other DNA
acatactataggtccaagtggtataat

SEQ ID NO: 254 - protein, 9 aa, synthetic construct
  REGION 1..9: note = Description of Artificial Sequence: Synthetic peptide
TYYRSKWYN

SEQ ID NO: 255 - DNA, 69 bp, synthetic construct
  misc_feature 1..69: note = Description of Artificial Sequence: Synthetic oligonucleotide
  source 1..69: mol_type = other DNA
gcaagggcgggaattgttgtagtgccaggtccggaaactttctactattatgatcacggtttggacgtc

SEQ ID NO: 256 - protein, 23 aa, synthetic construct
  REGION 1..23: note = Description of Artificial Sequence: Synthetic peptide
ARAGIVVVPGPETFYYYDHGLDV

SEQ ID NO: 257 - DNA, 324 bp, synthetic construct
  misc_feature 1..324: note = Description of Artificial Sequence: Synthetic polynucleotide
  source 1..324: mol_type = other DNA
gacatccagatgacccagtctccatcctccctgtctgcatctgtaggagacagagtcaccatcacttgccgggcaagtcagagcattagaagctatttaaattggtatcagcagaaaccagggaaagcccctgagctcctgatccatgctgcatccagtttgcaaagtggggtcccttcaaggttcagtggcagtggatctgggacagatttcactctcaccatcagcagtctgcaacctgaagattttgcaagttattactgtcaacagagttacagtgcccctccgatcaccttcggccaagggacacgactggagattaaa

SEQ ID NO: 258 - protein, 108 aa, synthetic construct
  REGION 1..108: note = Description of Artificial Sequence: Synthetic polypeptide
DIQMTQSPSSLSASVGDRVTITCRASQSIRSYLNWYQQKPGKAPELLIHAASSLQSGVPSRFSGSGSGTDFTLTISSLQPEDFASYYCQQSYSAPPITFGQGTRLEIK

SEQ ID NO: 259 - DNA, 18 bp, synthetic construct
  misc_feature 1..18: note = Description of Artificial Sequence: Synthetic oligonucleotide
  source 1..18: mol_type = other DNA
cagagcattagaagctat

SEQ ID NO: 260 - protein, 6 aa, synthetic construct
  REGION 1..6: note = Description of Artificial Sequence: Synthetic peptide
QSIRSY

SEQ ID NO: 261-262 - skipped (2 entries)

SEQ ID NO: 263 - DNA, 30 bp, synthetic construct
  misc_feature 1..30: note = Description of Artificial Sequence: Synthetic oligonucleotide
  source 1..30: mol_type = other DNA
caacagagttacagtgcccctccgatcacc

SEQ ID NO: 264 - protein, 10 aa, synthetic construct
  REGION 1..10: note = Description of Artificial Sequence: Synthetic peptide
QQSYSAPPIT

SEQ ID NO: 265 - DNA, 399 bp, synthetic construct
  misc_feature 1..399: note = Description of Artificial Sequence: Synthetic polynucleotide
  source 1..399: mol_type = other DNA
caggtccagctgcagcagtcaggtccaggactggtgaagccctcgcaggccctctcactcacctgtgccatctccggggacagtgtctccagcaacagtgctgcttggaactggatcaggcagtccccctcgagaggccttgagtggctgggaaggacatattataggtccaagtggtataatgattatgcagtgtctgtgaaaagtcgaataaccatcaacccagacacatccaagaaccacttctccctgcacctgaattctatgactcccgaggacacggctgtgtattactgtgcaagggcgagaattgtagtcgttccaggtccggaggtttattactactactactacgatatggacgtctggggccaagggaccacggtcaccgtctcctca

SEQ ID NO: 266 - protein, 133 aa, synthetic construct
  REGION 1..133: note = Description of Artificial Sequence: Synthetic polypeptide
QVQLQQSGPGLVKPSQALSLTCAISGDSVSSNSAAWNWIRQSPSRGLEWLGRTYYRSKWYNDYAVSVKSRITINPDTSKNHFSLHLNSMTPEDTAVYYCARARIVVVPGPEVYYYYYYDMDVWGQGTTVTVSS

SEQ ID NO: 267 - DNA, 30 bp, synthetic construct
  misc_feature 1..30: note = Description of Artificial Sequence: Synthetic oligonucleotide
  source 1..30: mol_type = other DNA
ggggacagtgtctccagcaacagtgctgct

SEQ ID NO: 268 - protein, 10 aa, synthetic construct
  REGION 1..10: note = Description of Artificial Sequence: Synthetic peptide
GDSVSSNSAA

SEQ ID NO: 269 - DNA, 27 bp, synthetic construct
  misc_feature 1..27: note = Description of Artificial Sequence: Synthetic oligonucleotide
  source 1..27: mol_type = other DNA
acatattataggtccaagtggtataat

SEQ ID NO: 270 - protein, 9 aa, synthetic construct
  REGION 1..9: note = Description of Artificial Sequence: Synthetic peptide
TYYRSKWYN

SEQ ID NO: 271 - DNA, 69 bp, synthetic construct
  misc_feature 1..69: note = Description of Artificial Sequence: Synthetic oligonucleotide
  source 1..69: mol_type = other DNA
gcaagggcgagaattgtagtcgttccaggtccggaggtttattactactactactacgatatggacgtc

SEQ ID NO: 272 - protein, 23 aa, synthetic construct
  REGION 1..23: note = Description of Artificial Sequence: Synthetic peptide
ARARIVVVPGPEVYYYYYYDMDV

SEQ ID NO: 273 - DNA, 324 bp, synthetic construct
  misc_feature 1..324: note = Description of Artificial Sequence: Synthetic polynucleotide
  source 1..324: mol_type = other DNA
gacatccagatgacccagtctccatcctccctgtctgcatctgtaggagacagagtcaccatcacttgccgggcaagtcagagcattagaagctatttaaattggtatcagcagaaaccagggaaagcccctaagctcctgatctatgctgcatccagtttgcaaagtggggtcccatcaaggttcagtggcagtggatctgggacagatttcactctcaccatcagcagtctgcaacctgaagattttgcaacttactactgtcaacagagttacagtagccctccgatcaccttcggccaagggacacgactggagattaaa

SEQ ID NO: 274 - protein, 108 aa, synthetic construct
  REGION 1..108: note = Description of Artificial Sequence: Synthetic polypeptide
DIQMTQSPSSLSASVGDRVTITCRASQSIRSYLNWYQQKPGKAPKLLIYAASSLQSGVPSRFSGSGSGTDFTLTISSLQPEDFATYYCQQSYSSPPITFGQGTRLEIK

SEQ ID NO: 275 - DNA, 18 bp, synthetic construct
  misc_feature 1..18: note = Description of Artificial Sequence: Synthetic oligonucleotide
  source 1..18: mol_type = other DNA
cagagcattagaagctat

SEQ ID NO: 276 - protein, 6 aa, synthetic construct
  REGION 1..6: note = Description of Artificial Sequence: Synthetic peptide
QSIRSY

SEQ ID NO: 277-278 - skipped (2 entries)

SEQ ID NO: 279 - DNA, 30 bp, synthetic construct
  misc_feature 1..30: note = Description of Artificial Sequence: Synthetic oligonucleotide
  source 1..30: mol_type = other DNA
caacagagttacagtagccctccgatcacc

SEQ ID NO: 280 - protein, 10 aa, synthetic construct
  REGION 1..10: note = Description of Artificial Sequence: Synthetic peptide
QQSYSSPPIT

SEQ ID NO: 281 - DNA, 399 bp, synthetic construct
  misc_feature 1..399: note = Description of Artificial Sequence: Synthetic polynucleotide
  source 1..399: mol_type = other DNA
caggtacagctgcagcagtcaggtccaggactggtgaagccctcgcagaccctctcactcacctgtgtcatctccggggacagtgtctctactaatagtgctgcttggaactggatcaggcagtccccatcgagaggccttgagtggctgggaaggacatattataggtccaagtggtataatgattatgcagtatctgtgagaagtcgaataaccatcaacccagtcacatccaagaaccaggtcgccctgcatctgaactctgtgactcccgaggacacggctgtgtattactgtgcaagggcgggaattgttgtggtgccaggtccggaaacttattactattattatcacggtttggacgtctggggccaagggaccacggtcaccgtctcctca

SEQ ID NO: 282 - protein, 133 aa, synthetic construct
  REGION 1..133: note = Description of Artificial Sequence: Synthetic polypeptide
QVQLQQSGPGLVKPSQTLSLTCVISGDSVSTNSAAWNWIRQSPSRGLEWLGRTYYRSKWYNDYAVSVRSRITINPVTSKNQVALHLNSVTPEDTAVYYCARAGIVVVPGPETYYYYYHGLDVWGQGTTVTVSS

SEQ ID NO: 283 - DNA, 30 bp, synthetic construct
  misc_feature 1..30: note = Description of Artificial Sequence: Synthetic oligonucleotide
  source 1..30: mol_type = other DNA
ggggacagtgtctctactaatagtgctgct

SEQ ID NO: 284 - protein, 10 aa, synthetic construct
  REGION 1..10: note = Description of Artificial Sequence: Synthetic peptide
GDSVSTNSAA

SEQ ID NO: 285 - DNA, 27 bp, synthetic construct
  misc_feature 1..27: note = Description of Artificial Sequence: Synthetic oligonucleotide
  source 1..27: mol_type = other DNA
acatattataggtccaagtggtataat

SEQ ID NO: 286 - protein, 9 aa, synthetic construct
  REGION 1..9: note = Description of Artificial Sequence: Synthetic peptide
TYYRSKWYN

SEQ ID NO: 287 - DNA, 69 bp, synthetic construct
  misc_feature 1..69: note = Description of Artificial Sequence: Synthetic oligonucleotide
  source 1..69: mol_type = other DNA
gcaagggcgggaattgttgtggtgccaggtccggaaacttattactattattatcacggtttggacgtc

SEQ ID NO: 288 - protein, 23 aa, synthetic construct
  REGION 1..23: note = Description of Artificial Sequence: Synthetic peptide
ARAGIVVVPGPETYYYYYHGLDV

SEQ ID NO: 289 - DNA, 324 bp, synthetic construct
  misc_feature 1..324: note = Description of Artificial Sequence: Synthetic polynucleotide
  source 1..324: mol_type = other DNA
gacatccagatgacccagtctccatcctccctgtctgcatctgtaggagacagagtcaccatcacttgccgggcaagtcagaacattagaagctatttaaattggtatcagcagaaaccagggaaagcccctaagctcctgatccatgttgcatccagtttgcaaagtggggtcccatcaaggttcagtggcagtggatctgggacagatttcactctcaccatcagcagtctgcaacctgaagattttgcaacttactactgtcaacagagttacagtacccctccgatcaccttcggccacgggacacgactggaaattaaa

SEQ ID NO: 290 - protein, 108 aa, synthetic construct
  REGION 1..108: note = Description of Artificial Sequence: Synthetic polypeptide
DIQMTQSPSSLSASVGDRVTITCRASQNIRSYLNWYQQKPGKAPKLLIHVASSLQSGVPSRFSGSGSGTDFTLTISSLQPEDFATYYCQQSYSTPPITFGHGTRLEIK

SEQ ID NO: 291 - DNA, 18 bp, synthetic construct
  misc_feature 1..18: note = Description of Artificial Sequence: Synthetic oligonucleotide
  source 1..18: mol_type = other DNA
cagaacattagaagctat

SEQ ID NO: 292 - protein, 6 aa, synthetic construct
  REGION 1..6: note = Description of Artificial Sequence: Synthetic peptide
QNIRSY

SEQ ID NO: 293-294 - skipped (2 entries)

SEQ ID NO: 295 - DNA, 30 bp, synthetic construct; identical to SEQ ID NO: 15
  misc_feature 1..30: note = Description of Artificial Sequence: Synthetic oligonucleotide
  source 1..30: mol_type = other DNA

SEQ ID NO: 296 - protein, 10 aa, synthetic construct
  REGION 1..10: note = Description of Artificial Sequence: Synthetic peptide
QQSYSTPPIT

SEQ ID NO: 297 - DNA, 348 bp, synthetic construct
  misc_feature 1..348: note = Description of Artificial Sequence: Synthetic polynucleotide
  source 1..348: mol_type = other DNA
cagctgcagctgcaggagtcgggcccaggactggtgaagccttcggagaccctgtccctcacctgcactgtctctggtggctccctcagcagtaatagttactactggggctggatccgccagcccccagggaaggggctggagtggattgggagtatctattatagtgggagcacctactacaacccgtccctcaagagtcgagtcaccatatccgtagacacgtcccagaaccagttctccctgaagctgagctctgtgaccgccgcagacacggctgtgtattactgtgcgagacagaactactttgactactggggccagggaaccctggtcaccgtctcctca

SEQ ID NO: 298 - protein, 116 aa, synthetic construct
  REGION 1..116: note = Description of Artificial Sequence: Synthetic polypeptide
QLQLQESGPGLVKPSETLSLTCTVSGGSLSSNSYYWGWIRQPPGKGLEWIGSIYYSGSTYYNPSLKSRVTISVDTSQNQFSLKLSSVTAADTAVYYCARQNYFDYWGQGTLVTVSS

SEQ ID NO: 299 - DNA, 30 bp, synthetic construct
  misc_feature 1..30: note = Description of Artificial Sequence: Synthetic oligonucleotide
  source 1..30: mol_type = other DNA
ggtggctccctcagcagtaatagttactac

SEQ ID NO: 300 - protein, 10 aa, synthetic construct
  REGION 1..10: note = Description of Artificial Sequence: Synthetic peptide
GGSLSSNSYY

SEQ ID NO: 301 - DNA, 21 bp, synthetic construct
  misc_feature 1..21: note = Description of Artificial Sequence: Synthetic oligonucleotide
  source 1..21: mol_type = other DNA
atctattatagtgggagcacc

SEQ ID NO: 302 - protein, 7 aa, synthetic construct
  REGION 1..7: note = Description of Artificial Sequence: Synthetic peptide
IYYSGST

SEQ ID NO: 303 - DNA, 24 bp, synthetic construct
  misc_feature 1..24: note = Description of Artificial Sequence: Synthetic oligonucleotide
  source 1..24: mol_type = other DNA
gcgagacagaactactttgactac

SEQ ID NO: 304 - protein, 8 aa, synthetic construct
  REGION 1..8: note = Description of Artificial Sequence: Synthetic peptide
ARQNYFDY

SEQ ID NO: 305 - DNA, 321 bp, synthetic construct
  misc_feature 1..321: note = Description of Artificial Sequence: Synthetic polynucleotide
  source 1..321: mol_type = other DNA
gacatccagttgacccagtctccatccttcctgtctgcatctgtaggagacagagtcaccatcacttgctgggccagtcagggcattagcaggtatttagcctggtatcagcaaaaaccagggaaagcccctaagctcctgatctatgctgcatccactttgcaaagtggggtcccatcaaggttcagcggcagtggatctgggacagaattcactctcacaatcagcagcctgcagcctgaagattttgcaacttattactgtcaacagcttaatagttatcctctcactttcggccctgggaccaaactggatatcaaa

SEQ ID NO: 306 - protein, 107 aa, synthetic construct
  REGION 1..107: note = Description of Artificial Sequence: Synthetic polypeptide
DIQLTQSPSFLSASVGDRVTITCWASQGISRYLAWYQQKPGKAPKLLIYAASTLQSGVPSRFSGSGSGTEFTLTISSLQPEDFATYYCQQLNSYPLTFGPGTKLDIK

SEQ ID NO: 307 - DNA, 18 bp, synthetic construct
  misc_feature 1..18: note = Description of Artificial Sequence: Synthetic oligonucleotide
  source 1..18: mol_type = other DNA
cagggcattagcaggtat

SEQ ID NO: 308 - protein, 6 aa, synthetic construct
  REGION 1..6: note = Description of Artificial Sequence: Synthetic peptide
QGISRY

SEQ ID NO: 309-310 - skipped (2 entries)

SEQ ID NO: 311 - DNA, 27 bp, synthetic construct
  misc_feature 1..27: note = Description of Artificial Sequence: Synthetic oligonucleotide
  source 1..27: mol_type = other DNA
caacagcttaatagttatcctctcact

SEQ ID NO: 312 - protein, 9 aa, synthetic construct
  REGION 1..9: note = Description of Artificial Sequence: Synthetic peptide
QQLNSYPLT

SEQ ID NO: 313 - DNA, 345 bp, synthetic construct
  misc_feature 1..345: note = Description of Artificial Sequence: Synthetic polynucleotide
  source 1..345: mol_type = other DNA
caggtgcagctggtggagtctgggggaggcgtggtccagcctgggaggtccctgagactctcctgtgcagtctctggattcacctccagtacctatggcatgaactgggtccgccaggctccaggcaaggggctggagtgggtggcagttatatcatatgatggaagtaataaatactacgcagactccgtgaagggccgattcaccatctccagggacaattccaagaacacgctgtatctgcaaatgaacagcctgagacctgaggacacggctgtgtattactgtgcgagaggaaggtacttcgatctctggggccgtggcaccctggtcactgtctcctca

SEQ ID NO: 314 - protein, 115 aa, synthetic construct
  REGION 1..115: note = Description of Artificial Sequence: Synthetic polypeptide
QVQLVESGGGVVQPGRSLRLSCAVSGFTSSTYGMNWVRQAPGKGLEWVAVISYDGSNKYYADSVKGRFTISRDNSKNTLYLQMNSLRPEDTAVYYCARGRYFDLWGRGTLVTVSS

SEQ ID NO: 315 - DNA, 24 bp, synthetic construct
  misc_feature 1..24: note = Description of Artificial Sequence: Synthetic oligonucleotide
  source 1..24: mol_type = other DNA
ggattcacctccagtacctatggc

SEQ ID NO: 316 - protein, 8 aa, synthetic construct
  REGION 1..8: note = Description of Artificial Sequence: Synthetic peptide
GFTSSTYG

SEQ ID NO: 317 - DNA, 24 bp, synthetic construct
  misc_feature 1..24: note = Description of Artificial Sequence: Synthetic oligonucleotide
  source 1..24: mol_type = other DNA
atatcatatgatggaagtaataaa

SEQ ID NO: 318 - protein, 8 aa, synthetic construct
  REGION 1..8: note = Description of Artificial Sequence: Synthetic peptide
ISYDGSNK

SEQ ID NO: 319 - DNA, 24 bp, synthetic construct
  misc_feature 1..24: note = Description of Artificial Sequence: Synthetic oligonucleotide
  source 1..24: mol_type = other DNA
gcgagaggaaggtacttcgatctc

SEQ ID NO: 320 - protein, 8 aa, synthetic construct
  REGION 1..8: note = Description of Artificial Sequence: Synthetic peptide
ARGRYFDL

SEQ ID NO: 321 - DNA, 321 bp, synthetic construct
  misc_feature 1..321: note = Description of Artificial Sequence: Synthetic polynucleotide
  source 1..321: mol_type = other DNA
gacatccagatgacccagtctccttccaccctgtctgcatctgtaggagacagagtcaccatcacttgccgggccagtcaaattattagtagctggttggcctggtatcagcagaaaccagggaaagcccctaaactcctgatctataaggcgtctagtttagcaagtggggtcccatcaaggttcagcggcagtggatctgggacagaattcactctcaccatcagcagcctgcagcctgatgattttgcaacttattactgccaacagtataaaagttattcttacacctttggccaggggaccaacctggagatcaaa

SEQ ID NO: 322 - protein, 107 aa, synthetic construct
  REGION 1..107: note = Description of Artificial Sequence: Synthetic polypeptide
DIQMTQSPSTLSASVGDRVTITCRASQIISSWLAWYQQKPGKAPKLLIYKASSLASGVPSRFSGSGSGTEFTLTISSLQPDDFATYYCQQYKSYSYTFGQGTNLEIK

SEQ ID NO: 323 - DNA, 18 bp, synthetic construct
  misc_feature 1..18: note = Description of Artificial Sequence: Synthetic oligonucleotide
  source 1..18: mol_type = other DNA
caaattattagtagctgg

SEQ ID NO: 324 - protein, 6 aa, synthetic construct
  REGION 1..6: note = Description of Artificial Sequence: Synthetic peptide
QIISSW

SEQ ID NO: 325-326 - skipped (2 entries)

SEQ ID NO: 327 - DNA, 27 bp, synthetic construct
  misc_feature 1..27: note = Description of Artificial Sequence: Synthetic oligonucleotide
  source 1..27: mol_type = other DNA
caacagtataaaagttattcttacacc

SEQ ID NO: 328 - protein, 9 aa, synthetic construct
  REGION 1..9: note = Description of Artificial Sequence: Synthetic peptide
QQYKSYSYT

SEQ ID NO: 329 - DNA, 378 bp, synthetic construct
  misc_feature 1..378: note = Description of Artificial Sequence: Synthetic polynucleotide
  source 1..378: mol_type = other DNA
caggtgcagctggtggagtctgggggaggcgtggtccagcctgggaggtccctgggactctcctgtgcagcgtctggattcaccttcagtagctatggcatgcactgggtccgccaggctccaggcaaggggctggagtgggtggcagttatatggtatgatggaagtaataaatactatgtagactccgtgaagggccgattcaccatctccagagacaattccaagaacacgctgtatctgcaaatgaacagcctgagagccgaggacacggctgtgtattactgtgcgagagaggggctacgatttttggagaattactactactactacggtatggacgtctggggccaagggaccacggtcaccgtctcctca

SEQ ID NO: 330 - protein, 126 aa, synthetic construct
  REGION 1..126: note = Description of Artificial Sequence: Synthetic polypeptide
QVQLVESGGGVVQPGRSLGLSCAASGFTFSSYGMHWVRQAPGKGLEWVAVIWYDGSNKYYVDSVKGRFTISRDNSKNTLYLQMNSLRAEDTAVYYCAREGLRFLENYYYYYGMDVWGQGTTVTVSS

SEQ ID NO: 331 - DNA, 24 bp, synthetic construct
  misc_feature 1..24: note = Description of Artificial Sequence: Synthetic oligonucleotide
  source 1..24: mol_type = other DNA
ggattcaccttcagtagctatggc

SEQ ID NO: 332 - protein, 8 aa, synthetic construct
  REGION 1..8: note = Description of Artificial Sequence: Synthetic peptide
GFTFSSYG

SEQ ID NO: 333 - DNA, 24 bp, synthetic construct
  misc_feature 1..24: note = Description of Artificial Sequence: Synthetic oligonucleotide
  source 1..24: mol_type = other DNA
atatggtatgatggaagtaataaa

SEQ ID NO: 334 - protein, 8 aa, synthetic construct
  REGION 1..8: note = Description of Artificial Sequence: Synthetic peptide
IWYDGSNK

SEQ ID NO: 335 - DNA, 57 bp, synthetic construct
  misc_feature 1..57: note = Description of Artificial Sequence: Synthetic oligonucleotide
  source 1..57: mol_type = other DNA
gcgagagaggggctacgatttttggagaattactactactactacggtatggacgtc

SEQ ID NO: 336 - protein, 19 aa, synthetic construct
  REGION 1..19: note = Description of Artificial Sequence: Synthetic peptide
AREGLRFLENYYYYYGMDV

SEQ ID NO: 337 - DNA, 324 bp, synthetic construct
  misc_feature 1..324: note = Description of Artificial Sequence: Synthetic polynucleotide
  source 1..324: mol_type = other DNA
gaaattgtgttgacgcagtctccaggcaccctgtctttgtctccaggggaaagagccaccctctcctgcagggccagtcagagtattagcagcacctacttagcctggtaccagcagagacctggccaggctcccaggctcctcatctatggtgcatccagcagggccactggcatcccagacaggttcagtggcagtgggtctgggacagacttcactctcaccatcagcagactggagcctgaagattttgcagtgtattactgtcagcagtatggtacctcaccgtacacttttggccaggggaccaagctggagatcaaa

SEQ ID NO: 338 - protein, 108 aa, synthetic construct
  REGION 1..108: note = Description of Artificial Sequence: Synthetic polypeptide
EIVLTQSPGTLSLSPGERATLSCRASQSISSTYLAWYQQRPGQAPRLLIYGASSRATGIPDRFSGSGSGTDFTLTISRLEPEDFAVYYCQQYGTSPYTFGQGTKLEIK

SEQ ID NO: 339 - DNA, 21 bp, synthetic construct
  misc_feature 1..21: note = Description of Artificial Sequence: Synthetic oligonucleotide
  source 1..21: mol_type = other DNA
cagagtattagcagcacctac

SEQ ID NO: 340 - protein, 7 aa, synthetic construct
  REGION 1..7: note = Description of Artificial Sequence: Synthetic peptide
QSISSTY

SEQ ID NO: 341-342 - skipped (2 entries)

SEQ ID NO: 343 - DNA, 27 bp, synthetic construct
  misc_feature 1..27: note = Description of Artificial Sequence: Synthetic oligonucleotide
  source 1..27: mol_type = other DNA
cagcagtatggtacctcaccgtacact

SEQ ID NO: 344 - protein, 9 aa, synthetic construct
  REGION 1..9: note = Description of Artificial Sequence: Synthetic peptide
QQYGTSPYT

SEQ ID NO: 345 - DNA, 345 bp, synthetic construct; identical to SEQ ID NO: 313
  misc_feature 1..345: note = Description of Artificial Sequence: Synthetic polynucleotide
  source 1..345: mol_type = other DNA

SEQ ID NO: 346 - protein, 115 aa, synthetic construct; identical to SEQ ID NO: 314
  REGION 1..115: note = Description of Artificial Sequence: Synthetic polypeptide

SEQ ID NO: 347 - DNA, 24 bp, synthetic construct
  misc_feature 1..24: note = Description of Artificial Sequence: Synthetic oligonucleotide
  source 1..24: mol_type = other DNA
ggattcacctccagtacctatggc

SEQ ID NO: 348 - protein, 8 aa, synthetic construct
  REGION 1..8: note = Description of Artificial Sequence: Synthetic peptide
GFTSSTYG

SEQ ID NO: 349 - DNA, 24 bp, synthetic construct
  misc_feature 1..24: note = Description of Artificial Sequence: Synthetic oligonucleotide
  source 1..24: mol_type = other DNA
atatcatatgatggaagtaataaa

SEQ ID NO: 350 - protein, 8 aa, synthetic construct
  REGION 1..8: note = Description of Artificial Sequence: Synthetic peptide
ISYDGSNK

SEQ ID NO: 351 - DNA, 24 bp, synthetic construct
  misc_feature 1..24: note = Description of Artificial Sequence: Synthetic oligonucleotide
  source 1..24: mol_type = other DNA
gcgagaggaaggtacttcgatctc

SEQ ID NO: 352 - protein, 8 aa, synthetic construct
  REGION 1..8: note = Description of Artificial Sequence: Synthetic peptide
ARGRYFDL

SEQ ID NO: 353 - DNA, 321 bp, synthetic construct
  misc_feature 1..321: note = Description of Artificial Sequence: Synthetic polynucleotide
  source 1..321: mol_type = other DNA
gacatccagatgacccagtctccttccaccctgtctgcatctgtaggagacagagtcaccatcacttgccgggccagtcaaattattagtagctggttggcctggtatcagcagaaaccagggaaagcccctaaactcctgatctataaggcgtctagtttagcaagtggggtcccatcaaggttcagcggcagtggatctgggacagaattcactctcaccatcagcagcctgcagcctgatgattttgcaacttattactgccaacagtataaaagttattcttacacctttggccaggggaccaagctggagatcaaa

SEQ ID NO: 354 - protein, 107 aa, synthetic construct
  REGION 1..107: note = Description of Artificial Sequence: Synthetic polypeptide
DIQMTQSPSTLSASVGDRVTITCRASQIISSWLAWYQQKPGKAPKLLIYKASSLASGVPSRFSGSGSGTEFTLTISSLQPDDFATYYCQQYKSYSYTFGQGTKLEIK

SEQ ID NO: 355 - DNA, 18 bp, synthetic construct
  misc_feature 1..18: note = Description of Artificial Sequence: Synthetic oligonucleotide
  source 1..18: mol_type = other DNA
caaattattagtagctgg

SEQ ID NO: 356 - protein, 6 aa, synthetic construct
  REGION 1..6: note = Description of Artificial Sequence: Synthetic peptide
QIISSW

SEQ ID NO: 357-358 - skipped (2 entries)

SEQ ID NO: 359 - DNA, 27 bp, synthetic construct
  misc_feature 1..27: note = Description of Artificial Sequence: Synthetic oligonucleotide
  source 1..27: mol_type = other DNA
caacagtataaaagttattcttacacc

SEQ ID NO: 360 - protein, 9 aa, synthetic construct
  REGION 1..9: note = Description of Artificial Sequence: Synthetic peptide
QQYKSYSYT

SEQ ID NO: 361 - DNA, 345 bp, synthetic construct
  misc_feature 1..345: note = Description of Artificial Sequence: Synthetic polynucleotide
  source 1..345: mol_type = other DNA
caggtgcagctggtggagtctgggggaggcgtggtccagcctgggaggtccctgagactctcctgtgcagtctctggattcacctccagtacctatggcatgaactgggtccgccaggctccaggcaaggggctggagtgggtggcagttatatcatttgatggaagtaataaatactacgcagactccgtgaagggccgattcaccatctccagggacaattccaagaacacgctgtatctgcaaatgagcagcctgagacctgaggacacggctgtgtattactgtgcgagaggaaggtacttcgatctctggggccgtggcaccctggtcactgtctcctca

SEQ ID NO: 362 - protein, 115 aa, synthetic construct
  REGION 1..115: note = Description of Artificial Sequence: Synthetic polypeptide
QVQLVESGGGVVQPGRSLRLSCAVSGFTSSTYGMNWVRQAPGKGLEWVAVISFDGSNKYYADSVKGRFTISRDNSKNTLYLQMSSLRPEDTAVYYCARGRYFDLWGRGTLVTVSS

SEQ ID NO: 363 - DNA, 24 bp, synthetic construct
  misc_feature 1..24: note = Description of Artificial Sequence: Synthetic oligonucleotide
  source 1..24: mol_type = other DNA
ggattcacctccagtacctatggc

SEQ ID NO: 364 - protein, 8 aa, synthetic construct
  REGION 1..8: note = Description of Artificial Sequence: Synthetic peptide
GFTSSTYG

SEQ ID NO: 365 - DNA, 24 bp, synthetic construct
  misc_feature 1..24: note = Description of Artificial Sequence: Synthetic oligonucleotide
  source 1..24: mol_type = other DNA
atatcatttgatggaagtaataaa

SEQ ID NO: 366 - protein, 8 aa, synthetic construct
  REGION 1..8: note = Description of Artificial Sequence: Synthetic peptide
ISFDGSNK

SEQ ID NO: 367 - DNA, 24 bp, synthetic construct
  misc_feature 1..24: note = Description of Artificial Sequence: Synthetic oligonucleotide
  source 1..24: mol_type = other DNA
gcgagaggaaggtacttcgatctc

SEQ ID NO: 368 - protein, 8 aa, synthetic construct
  REGION 1..8: note = Description of Artificial Sequence: Synthetic peptide
ARGRYFDL

SEQ ID NO: 369 - DNA, 321 bp, synthetic construct
  misc_feature 1..321: note = Description of Artificial Sequence: Synthetic polynucleotide
  source 1..321: mol_type = other DNA
gacacccagatgacccagtctccttccaccctgtctgcatctgtaggagacagagtcaccatcacttgccgggccagtcaaattattagtagctggttggcctggtatcagcagaaaccagggaaagcccctaaactcctgatctataaggcgtctagtttagcaagtggggtcccatcaaggttcagcggcagtggatctgggacagaattcactctcaccatcagcagcctgcagcctgatgattttgcaacttattactgccaacagtataaaagttattcttacacctttggccaggggaccaacctggagatcaaa

SEQ ID NO: 370 - protein, 107 aa, synthetic construct
  REGION 1..107: note = Description of Artificial Sequence: Synthetic polypeptide
DTQMTQSPSTLSASVGDRVTITCRASQIISSWLAWYQQKPGKAPKLLIYKASSLASGVPSRFSGSGSGTEFTLTISSLQPDDFATYYCQQYKSYSYTFGQGTNLEIK

SEQ ID NO: 371 - DNA, 18 bp, synthetic construct
  misc_feature 1..18: note = Description of Artificial Sequence: Synthetic oligonucleotide
  source 1..18: mol_type = other DNA
caaattattagtagctgg

SEQ ID NO: 372 - protein, 6 aa, synthetic construct
  REGION 1..6: note = Description of Artificial Sequence: Synthetic peptide
QIISSW

SEQ ID NO: 373-374 - skipped (2 entries)

SEQ ID NO: 375 - DNA, 27 bp, synthetic construct
  misc_feature 1..27: note = Description of Artificial Sequence: Synthetic oligonucleotide
  source 1..27: mol_type = other DNA
caacagtataaaagttattcttacacc

SEQ ID NO: 376 - protein, 9 aa, synthetic construct
  REGION 1..9: note = Description of Artificial Sequence: Synthetic peptide
QQYKSYSYT

SEQ ID NO: 377 - DNA, 345 bp, synthetic construct; identical to SEQ ID NO: 361
  misc_feature 1..345: note = Description of Artificial Sequence: Synthetic polynucleotide
  source 1..345: mol_type = other DNA

SEQ ID NO: 378 - protein, 115 aa, synthetic construct; identical to SEQ ID NO: 362
  REGION 1..115: note = Description of Artificial Sequence: Synthetic polypeptide

SEQ ID NO: 379 - DNA, 24 bp, synthetic construct
  misc_feature 1..24: note = Description of Artificial Sequence: Synthetic oligonucleotide
  source 1..24: mol_type = other DNA
ggattcacctccagtacctatggc

SEQ ID NO: 380 - protein, 8 aa, synthetic construct
  REGION 1..8: note = Description of Artificial Sequence: Synthetic peptide
GFTSSTYG

SEQ ID NO: 381 - DNA, 24 bp, synthetic construct
  misc_feature 1..24: note = Description of Artificial Sequence: Synthetic oligonucleotide
  source 1..24: mol_type = other DNA
atatcatttgatggaagtaataaa

SEQ ID NO: 382 - protein, 8 aa, synthetic construct
  REGION 1..8: note = Description of Artificial Sequence: Synthetic peptide
ISFDGSNK

SEQ ID NO: 383 - DNA, 24 bp, synthetic construct
  misc_feature 1..24: note = Description of Artificial Sequence: Synthetic oligonucleotide
  source 1..24: mol_type = other DNA
gcgagaggaaggtacttcgatctc

SEQ ID NO: 384 - protein, 8 aa, synthetic construct
  REGION 1..8: note = Description of Artificial Sequence: Synthetic peptide
ARGRYFDL

SEQ ID NO: 385 - DNA, 321 bp, synthetic construct; identical to SEQ ID NO: 369
  misc_feature 1..321: note = Description of Artificial Sequence: Synthetic polynucleotide
  source 1..321: mol_type = other DNA

SEQ ID NO: 386 - protein, 107 aa, synthetic construct; identical to SEQ ID NO: 370
  REGION 1..107: note = Description of Artificial Sequence: Synthetic polypeptide

SEQ ID NO: 387 - DNA, 18 bp, synthetic construct
  misc_feature 1..18: note = Description of Artificial Sequence: Synthetic oligonucleotide
  source 1..18: mol_type = other DNA
caaattattagtagctgg

SEQ ID NO: 388 - protein, 6 aa, synthetic construct
  REGION 1..6: note = Description of Artificial Sequence: Synthetic peptide
QIISSW

SEQ ID NO: 389-390 - skipped (2 entries)

SEQ ID NO: 391 - DNA, 27 bp, synthetic construct
  misc_feature 1..27: note = Description of Artificial Sequence: Synthetic oligonucleotide
  source 1..27: mol_type = other DNA
caacagtataaaagttattcttacacc

SEQ ID NO: 392 - protein, 9 aa, synthetic construct
  REGION 1..9: note = Description of Artificial Sequence: Synthetic peptide
QQYKSYSYT

SEQ ID NO: 393-400 - skipped (8 entries)

SEQ ID NO: 401 - DNA, 369 bp, synthetic construct
  misc_feature 1..369: note = Description of Artificial Sequence: Synthetic polynucleotide
  source 1..369: mol_type = other DNA
gaagtgcaactggtggagtctgggggaggcttagtacagcctggcgggtccctgagactctcctgtgcagccactggattcacctttgatgattttaccatgcactgggtccggcaagctccagggaagggcctggagtgggtctcaggtatcagttggaatagtggtagcataggctatgtggactctgtgaagggccgattcaccatctccagagacaacgccaagaactccctgtatctgcaaatgaacagtctgagagctgaggacacggccttgtactactgtgcaaaagataatagtggctacggctattattactacggtatggacgtctggggccaagggaccacggtcaccgtctcctca

SEQ ID NO: 402 - protein, 123 aa, synthetic construct
  REGION 1..123: note = Description of Artificial Sequence: Synthetic polypeptide
EVQLVESGGGLVQPGGSLRLSCAATGFTFDDFTMHWVRQAPGKGLEWVSGISWNSGSIGYVDSVKGRFTISRDNAKNSLYLQMNSLRAEDTALYYCAKDNSGYGYYYYGMDVWGQGTTVTVSS

SEQ ID NO: 403 - DNA, 24 bp, synthetic construct
  misc_feature 1..24: note = Description of Artificial Sequence: Synthetic oligonucleotide
  source 1..24: mol_type = other DNA
ggattcacctttgatgattttacc

SEQ ID NO: 404 - protein, 8 aa, synthetic construct
  REGION 1..8: note = Description of Artificial Sequence: Synthetic peptide
GFTFDDFT

SEQ ID NO: 405 - DNA, 24 bp, synthetic construct
  misc_feature 1..24: note = Description of Artificial Sequence: Synthetic oligonucleotide
  source 1..24: mol_type = other DNA
atcagttggaatagtggtagcata

SEQ ID NO: 406 - protein, 8 aa, synthetic construct
  REGION 1..8: note = Description of Artificial Sequence: Synthetic peptide
ISWNSGSI

SEQ ID NO: 407 - DNA, 48 bp, synthetic construct
  misc_feature 1..48: note = Description of Artificial Sequence: Synthetic oligonucleotide
  source 1..48: mol_type = other DNA
gcaaaagataatagtggctacggctattattactacggtatggacgtc

SEQ ID NO: 408 - protein, 16 aa, synthetic construct
  REGION 1..16: note = Description of Artificial Sequence: Synthetic peptide
AKDNSGYGYYYYGMDV

SEQ ID NO: 409 - DNA, 321 bp, synthetic construct
  misc_feature 1..321: note = Description of Artificial Sequence: Synthetic polynucleotide
  source 1..321: mol_type = other DNA
gaaatagtgatgacgcagtctccagccaccctgtctgtgtctccaggggaaagagccaccctctcctgcagggccagtcacagtgttagcaggaactcagcctggtaccagcagaaacctggccaggctcccaggctcctcatctatggtgcatccaccagggccactggtatcccagccaggttcagtggcagtgggtctgggacagaattcactctcaccatcagcagcctgcagtctgaagattttgcaatttattactgtcagcagtataataattggcctctcactttcggcggagggaccaaggtggagatcaaa

SEQ ID NO: 410 - protein, 107 aa, synthetic construct
  REGION 1..107: note = Description of Artificial Sequence: Synthetic polypeptide
EIVMTQSPATLSVSPGERATLSCRASHSVSRNSAWYQQKPGQAPRLLIYGASTRATGIPARFSGSGSGTEFTLTISSLQSEDFAIYYCQQYNNWPLTFGGGTKVEIK

SEQ ID NO: 411 - DNA, 18 bp, synthetic construct
  misc_feature 1..18: note = Description of Artificial Sequence: Synthetic oligonucleotide
  source 1..18: mol_type = other DNA
cacagtgttagcaggaac

SEQ ID NO: 412 - protein, 6 aa, synthetic construct
  REGION 1..6: note = Description of Artificial Sequence: Synthetic peptide
HSVSRN

SEQ ID NO: 413-414 - skipped (2 entries)

SEQ ID NO: 415 - DNA, 27 bp, synthetic construct
  misc_feature 1..27: note = Description of Artificial Sequence: Synthetic oligonucleotide
  source 1..27: mol_type = other DNA
cagcagtataataattggcctctcact

SEQ ID NO: 416 - protein, 9 aa, synthetic construct
  REGION 1..9: note = Description of Artificial Sequence: Synthetic peptide
QQYNNWPLT

SEQ ID NO: 417 - DNA, 372 bp, synthetic construct
  misc_feature 1..372: note = Description of Artificial Sequence: Synthetic polynucleotide
  source 1..372: mol_type = other DNA
gaagtgcaactggtggaatcggggggaggcttggtacagcctggcgggtccctgagactctcctgtgcagcctctggattctcctttgatgattataccatgcactgggtccggcaacctccagggaagggcctggagtgggtctcaggtattagttggaatagtggtagcataggctatgcggactctgtgaagggccgattcaccatctccagagacaacgccaagaactccctgtatctgcaaatgaacagtctgagagctggggacacggccttgtactactgtgcaaaagataatagtggctacggctattactactactacggtatggacgtctggggccaagggaccacggtcaccgtctcctca

SEQ ID NO: 418 - protein, 124 aa, synthetic construct
  REGION 1..124: note = Description of Artificial Sequence: Synthetic polypeptide
EVQLVESGGGLVQPGGSLRLSCAASGFSFDDYTMHWVRQPPGKGLEWVSGISWNSGSIGYADSVKGRFTISRDNAKNSLYLQMNSLRAGDTALYYCAKDNSGYGYYYYYGMDVWGQGTTVTVSS

SEQ ID NO: 419 - DNA, 24 bp, synthetic construct
  misc_feature 1..24: note = Description of Artificial Sequence: Synthetic oligonucleotide
  source 1..24: mol_type = other DNA
ggattctcctttgatgattatacc

SEQ ID NO: 420 - protein, 8 aa, synthetic construct
  REGION 1..8: note = Description of Artificial Sequence: Synthetic peptide
GFSFDDYT

SEQ ID NO: 421 - DNA, 24 bp, synthetic construct
  misc_feature 1..24: note = Description of Artificial Sequence: Synthetic oligonucleotide
  source 1..24: mol_type = other DNA
attagttggaatagtggtagcata

SEQ ID NO: 422 - protein, 8 aa, synthetic construct
  REGION 1..8: note = Description of Artificial Sequence: Synthetic peptide
ISWNSGSI

SEQ ID NO: 423 - DNA, 51 bp, synthetic construct
  misc_feature 1..51: note = Description of Artificial Sequence: Synthetic oligonucleotide
  source 1..51: mol_type = other DNA
gcaaaagataatagtggctacggctattactactactacggtatggacgtc

SEQ ID NO: 424 - protein, 17 aa, synthetic construct
  REGION 1..17: note = Description of Artificial Sequence: Synthetic peptide
AKDNSGYGYYYYYGMDV

SEQ ID NO: 425 - DNA, 321 bp, synthetic construct
  misc_feature 1..321: note = Description of Artificial Sequence: Synthetic polynucleotide
  source 1..321: mol_type = other DNA
gaaatagtgatgacgcagtctccagccaccctgtctgtgtctccaggggaaagagccaccctctcctgcagggccagtcagagtgttagcagcaacttagcctggtaccagcagaaacctggccaggctcccagactcctcatctatggtgcatccaccagggccactggtatcccagccaggttcagtggcagtgggtctgggacagaattcactctcaccatcagcagcctgcagtctgaagattttgcagtttattactgtcagcagtattataactggcctctcactttcggcggagggaccaaggtggagatcaaa

SEQ ID NO: 426 - protein, 107 aa, synthetic construct
  REGION 1..107: note = Description of Artificial Sequence: Synthetic polypeptide
EIVMTQSPATLSVSPGERATLSCRASQSVSSNLAWYQQKPGQAPRLLIYGASTRATGIPARFSGSGSGTEFTLTISSLQSEDFAVYYCQQYYNWPLTFGGGTKVEIK

SEQ ID NO: 427 - DNA, 18 bp, synthetic construct
  misc_feature 1..18: note = Description of Artificial Sequence: Synthetic oligonucleotide
  source 1..18: mol_type = other DNA
cagagtgttagcagcaac

SEQ ID NO: 428 - protein, 6 aa, synthetic construct
  REGION 1..6: note = Description of Artificial Sequence: Synthetic peptide
QSVSSN

SEQ ID NO: 429-430 - skipped (2 entries)

SEQ ID NO: 431 - DNA, 27 bp, synthetic construct
  misc_feature 1..27: note = Description of Artificial Sequence: Synthetic oligonucleotide
  source 1..27: mol_type = other DNA
cagcagtattataactggcctctcact

SEQ ID NO: 432 - protein, 9 aa, synthetic construct
  REGION 1..9: note = Description of Artificial Sequence: Synthetic peptide
QQYYNWPLT

SEQ ID NO: 433 - DNA, 372 bp, synthetic construct
  misc_feature 1..372: note = Description of Artificial Sequence: Synthetic polynucleotide
  source 1..372: mol_type = other DNA
gaagtacagctggtggagtctgggggaggcttggtacagcctggcaggtccctgagactctcctgtgtagcctctggattcccctttgctgattataccatgcactgggtccggcaagctccagggaagggcctggagtgggtctcagatattagttggaatagtggtagcaaaggctatgcggactctgtgaagggccgattcaccatctccagagacaatgccaagaactccctgtatctgcaaatgaacagtctgagaactgaggacacggccttctattactgtgcaaaagatatgagtggctacgcccactacttctactacggtatggacgtctggggccaagggaccacggtcaccgtctcctca

SEQ ID NO: 434 - protein, 124 aa, synthetic construct
  REGION 1..124: note = Description of Artificial Sequence: Synthetic polypeptide
EVQLVESGGGLVQPGRSLRLSCVASGFPFADYTMHWVRQAPGKGLEWVSDISWNSGSKGYADSVKGRFTISRDNAKNSLYLQMNSLRTEDTAFYYCAKDMSGYAHYFYYGMDVWGQGTTVTVSS

SEQ ID NO: 435 - DNA, 24 bp, synthetic construct
  misc_feature 1..24: note = Description of Artificial Sequence: Synthetic oligonucleotide
  source 1..24: mol_type = other DNA
ggattcccctttgctgattatacc

SEQ ID NO: 436 - protein, 8 aa, synthetic construct
  REGION 1..8: note = Description of Artificial Sequence: Synthetic peptide
GFPFADYT

SEQ ID NO: 437 - DNA, 24 bp, synthetic construct
  misc_feature 1..24: note = Description of Artificial Sequence: Synthetic oligonucleotide
  source 1..24: mol_type = other DNA
attagttggaatagtggtagcaaa

SEQ ID NO: 438 - protein, 8 aa, synthetic construct
  REGION 1..8: note = Description of Artificial Sequence: Synthetic peptide
ISWNSGSK

SEQ ID NO: 439 - DNA, 51 bp, synthetic construct
  misc_feature 1..51: note = Description of Artificial Sequence: Synthetic oligonucleotide
  source 1..51: mol_type = other DNA
gcaaaagatatgagtggctacgcccactacttctactacggtatggacgtc

SEQ ID NO: 440 - protein, 17 aa, synthetic construct
  REGION 1..17: note = Description of Artificial Sequence: Synthetic peptide
AKDMSGYAHYFYYGMDV

SEQ ID NO: 441 - DNA, 324 bp, synthetic construct
  misc_feature 1..324: note = Description of Artificial Sequence: Synthetic polynucleotide
  source 1..324: mol_type = other DNA
gacatccagatgacccagtctccatcctccctgtctgcatctgtaggagacagagtcaccatcacttgccggccaagtcagagcattagcagctatttaaattggtttcagcagaaaccagggaaagcccctaagctcctgatctatgctgcatccagtttgcaaagtggggtcccatcaaggttcagtggcagtggatctgggacagatttcactctcaccatcagcagtctgcaacctgaagattttgcaacttactactgtcaacagagttacagtacccctccgatcaccttcggccaagggacacgactggagattaaa

SEQ ID NO: 442 - protein, 108 aa, synthetic construct
  REGION 1..108: note = Description of Artificial Sequence: Synthetic polypeptide
DIQMTQSPSSLSASVGDRVTITCRPSQSISSYLNWFQQKPGKAPKLLIYAASSLQSGVPSRFSGSGSGTDFTLTISSLQPEDFATYYCQQSYSTPPITFGQGTRLEIK

SEQ ID NO: 443 - DNA, 18 bp, synthetic construct
  misc_feature 1..18: note = Description of Artificial Sequence: Synthetic oligonucleotide
  source 1..18: mol_type = other DNA
cagagcattagcagctat

SEQ ID NO: 444 - protein, 6 aa, synthetic construct
  REGION 1..6: note = Description of Artificial Sequence: Synthetic peptide
QSISSY

SEQ ID NO: 445-446 - skipped (2 entries)

SEQ ID NO: 447 - DNA, 30 bp, synthetic construct; identical to SEQ ID NO: 15
  misc_feature 1..30: note = Description of Artificial Sequence: Synthetic oligonucleotide
  source 1..30: mol_type = other DNA

SEQ ID NO: 448 - protein, 10 aa, synthetic construct
  REGION 1..10: note = Description of Artificial Sequence: Synthetic peptide
QQSYSTPPIT

SEQ ID NO: 449 - DNA, 372 bp, synthetic construct
  misc_feature 1..372: note = Description of Artificial Sequence: Synthetic polynucleotide
  source 1..372: mol_type = other DNA
gaagtacaactggtggagtctgggggaggcttggtacagcctggcaggtccctaagactctcctgtgcagcctctggattcacctttgatgattataccatgcactgggtccggcaagttccagggaagggcctggagtgggtctcaggtattagttggaatagtggcagcttggcctacgcggactctgtgaagggccgattcaccatctccagagacaacgccaagaattccctgtatctgcaaatgaacagtcttcaccctgaggacacggccctctattactgtgtaaaagatggtagtggctacggccactactcctactacggtttggacgtctggggccaggggaccacggtcaccgtctcctca

SEQ ID NO: 450 - protein, 124 aa, synthetic construct
  REGION 1..124: note = Description of Artificial Sequence: Synthetic polypeptide
EVQLVESGGGLVQPGRSLRLSCAASGFTFDDYTMHWVRQVPGKGLEWVSGISWNSGSLAYADSVKGRFTISRDNAKNSLYLQMNSLHPEDTALYYCVKDGSGYGHYSYYGLDVWGQGTTVTVSS

SEQ ID NO: 451 - DNA, 24 bp, synthetic construct
  misc_feature 1..24: note = Description of Artificial Sequence: Synthetic oligonucleotide
  source 1..24: mol_type = other DNA
ggattcacctttgatgattatacc

SEQ ID NO: 452 - protein, 8 aa, synthetic construct
  REGION 1..8: note = Description of Artificial Sequence: Synthetic peptide
GFTFDDYT

SEQ ID NO: 453 - DNA, 24 bp, synthetic construct
  misc_feature 1..24: note = Description of Artificial Sequence: Synthetic oligonucleotide
  source 1..24: mol_type = other DNA
attagttggaatagtggcagcttg

SEQ ID NO: 454 - protein, 8 aa, synthetic construct
  REGION 1..8: note = Description of Artificial Sequence: Synthetic peptide
ISWNSGSL

SEQ ID NO: 455 - DNA, 51 bp, synthetic construct
  misc_feature 1..51: note = Description of Artificial Sequence: Synthetic oligonucleotide
  source 1..51: mol_type = other DNA
gtaaaagatggtagtggctacggccactactcctactacggtttggacgtc

SEQ ID NO: 456 - protein, 17 aa, synthetic construct
  REGION 1..17: note = Description of Artificial Sequence: Synthetic peptide
VKDGSGYGHYSYYGLDV

SEQ ID NO: 457 - DNA, 324 bp, synthetic construct
  misc_feature 1..324: note = Description of Artificial Sequence: Synthetic polynucleotide
  source 1..324: mol_type = other DNA
gaaattgtgttgacgcagtctccaggcaccctgtctttgtctccaggggaaagagccaccctctcctgcagggccagtcagagtgttagcagcagctacttagcctggtaccagcagaaacctggccaggctcccaggctcctcatctatggtgcatccagcagggccactggcatcccagacaggttcagtggcagtgggtctgggacagacttcactctcaccatcagcagactggagcctgaagattttgcagtgtattactgtcagcagtatggtagttcaccttggacgttcggccaagggaccaaggtggaaatcaaa

SEQ ID NO: 458 - protein, 108 aa, synthetic construct; identical to SEQ ID NO: 114
  REGION 1..108: note = Description of Artificial Sequence: Synthetic polypeptide

SEQ ID NO: 459 - DNA, 21 bp, synthetic construct
  misc_feature 1..21: note = Description of Artificial Sequence: Synthetic oligonucleotide
  source 1..21: mol_type = other DNA
cagagtgttagcagcagctac

SEQ ID NO: 460 - protein, 7 aa, synthetic construct
  REGION 1..7: note = Description of Artificial Sequence: Synthetic peptide
QSVSSSY

SEQ ID NO: 461-462 - skipped (2 entries)

SEQ ID NO: 463 - DNA, 27 bp, synthetic construct
  misc_feature 1..27: note = Description of Artificial Sequence: Synthetic oligonucleotide
  source 1..27: mol_type = other DNA
cagcagtatggtagttcaccttggacg

SEQ ID NO: 464 - protein, 9 aa, synthetic construct
  REGION 1..9: note = Description of Artificial Sequence: Synthetic peptide
QQYGSSPWT

SEQ ID NO: 465 - DNA, 372 bp, synthetic construct
  misc_feature 1..372: note = Description of Artificial Sequence: Synthetic polynucleotide
  source 1..372: mol_type = other DNA
gaagtacagctggtggagtctgggggaggcttggtacagcctggcaggtccctgagactctcctgtgtagcctctggattcccctttgctgattataccatgcactgggtccggcaagctccagggaagggcctggagtgggtctcagatattagttggaatagtggtagcataggctatgcggactctgtgaagggccgattcaccatctccagagacaatgccaagaactccctgtatctgcaaatgaacagtctgagaactgaggacacggccttgtattactgtgcaaaagatatgagtggctacgcccactacttctactacggtatggacgtctggggccaagggaccacggtcaccgtctcctca

SEQ ID NO: 466 - protein, 124 aa, synthetic construct
  REGION 1..124: note = Description of Artificial Sequence: Synthetic polypeptide
EVQLVESGGGLVQPGRSLRLSCVASGFPFADYTMHWVRQAPGKGLEWVSDISWNSGSIGYADSVKGRFTISRDNAKNSLYLQMNSLRTEDTALYYCAKDMSGYAHYFYYGMDVWGQGTTVTVSS

SEQ ID NO: 467 - DNA, 24 bp, synthetic construct
  misc_feature 1..24: note = Description of Artificial Sequence: Synthetic oligonucleotide
  source 1..24: mol_type = other DNA
ggattcccctttgctgattatacc

SEQ ID NO: 468 - protein, 8 aa, synthetic construct
  REGION 1..8: note = Description of Artificial Sequence: Synthetic peptide
GFPFADYT

SEQ ID NO: 469 - DNA, 24 bp, synthetic construct
  misc_feature 1..24: note = Description of Artificial Sequence: Synthetic oligonucleotide
  source 1..24: mol_type = other DNA
attagttggaatagtggtagcata

SEQ ID NO: 470 - protein, 8 aa, synthetic construct
  REGION 1..8: note = Description of Artificial Sequence: Synthetic peptide
ISWNSGSI

SEQ ID NO: 471 - DNA, 51 bp, synthetic construct; identical to SEQ ID NO: 439
  misc_feature 1..51: note = Description of Artificial Sequence: Synthetic oligonucleotide
  source 1..51: mol_type = other DNA

SEQ ID NO: 472 - protein, 17 aa, synthetic construct
  REGION 1..17: note = Description of Artificial Sequence: Synthetic peptide
AKDMSGYAHYFYYGMDV

SEQ ID NO: 473 - DNA, 324 bp, synthetic construct
  misc_feature 1..324: note = Description of Artificial Sequence: Synthetic polynucleotide
  source 1..324: mol_type = other DNA
gacatccagatgacccagtctccatcctccctgtctgcatctgtaggagacagagtcaccatcacttgccgggcaagtcagagcattagcagctatttaaattggtatcagcagaaaccagggaaagcccctaagctcctgatctttgctgcatccagtttgcaaagtggggtcccatcaaggttcagtggcagtggatctgggacagatttcactctcaccatcagcagtctgcaacctgaagattttgcaacttactactgtcaacagagttacagtacccctccgatcaccttcggccaagggacacgactggagattaaa

SEQ ID NO: 474 - protein, 108 aa, synthetic construct
  REGION 1..108: note = Description of Artificial Sequence: Synthetic polypeptide
DIQMTQSPSSLSASVGDRVTITCRASQSISSYLNWYQQKPGKAPKLLIFAASSLQSGVPSRFSGSGSGTDFTLTISSLQPEDFATYYCQQSYSTPPITFGQGTRLEIK

SEQ ID NO: 475 - DNA, 18 bp, synthetic construct
  misc_feature 1..18: note = Description of Artificial Sequence: Synthetic oligonucleotide
  source 1..18: mol_type = other DNA
cagagcattagcagctat

SEQ ID NO: 476 - protein, 6 aa, synthetic construct
  REGION 1..6: note = Description of Artificial Sequence: Synthetic peptide
QSISSY

SEQ ID NO: 477-478 - skipped (2 entries)

SEQ ID NO: 479 - DNA, 30 bp, synthetic construct; identical to SEQ ID NO: 15
  misc_feature 1..30: note = Description of Artificial Sequence: Synthetic oligonucleotide
  source 1..30: mol_type = other DNA

SEQ ID NO: 480 - protein, 10 aa, synthetic construct
  REGION 1..10: note = Description of Artificial Sequence: Synthetic peptide
QQSYSTPPIT

SEQ ID NO: 481 - DNA, 372 bp, synthetic construct
  misc_feature 1..372: note = Description of Artificial Sequence: Synthetic polynucleotide
  source 1..372: mol_type = other DNA
gaagtgcagctggtggagtctgggggaggcttggtacagcctggcaggtccctgaaactctcctgtacagcctctggattcacctttgctgattataccatgcactgggtccgacaaggtccagggaagggcctggagtgggtctcagatattagttggaatagtggtagtaaaggctatgcggactctgtgaagggccgattcaccatctccagagacaacgccaagaactccctgtatctgcaaatgaacagtctgagaactgaggacacggccttgtattactgtgcaaaagatatgagtggctacgcccactactactactacgctttggacgtctggggccaagggaccacggtcaccgtctcctca

SEQ ID NO: 482 - protein, 124 aa, synthetic construct
  REGION 1..124: note = Description of Artificial Sequence: Synthetic polypeptide
EVQLVESGGGLVQPGRSLKLSCTASGFTFADYTMHWVRQGPGKGLEWVSDISWNSGSKGYADSVKGRFTISRDNAKNSLYLQMNSLRTEDTALYYCAKDMSGYAHYYYYALDVWGQGTTVTVSS

SEQ ID NO: 483 - DNA, 24 bp, synthetic construct
  misc_feature 1..24: note = Description of Artificial Sequence: Synthetic oligonucleotide
  source 1..24: mol_type = other DNA
ggattcacctttgctgattatacc

SEQ ID NO: 484 - protein, 8 aa, synthetic construct
  REGION 1..8: note = Description of Artificial Sequence: Synthetic peptide
GFTFADYT

SEQ ID NO: 485 - DNA, 24 bp, synthetic construct
  misc_feature 1..24: note = Description of Artificial Sequence: Synthetic oligonucleotide
  source 1..24: mol_type = other DNA
attagttggaatagtggtagtaaa

SEQ ID NO: 486 - protein, 8 aa, synthetic construct
  REGION 1..8: note = Description of Artificial Sequence: Synthetic peptide
ISWNSGSK

SEQ ID NO: 487 - DNA, 51 bp, synthetic construct
  misc_feature 1..51: note = Description of Artificial Sequence: Synthetic oligonucleotide
  source 1..51: mol_type = other DNA
gcaaaagatatgagtggctacgcccactactactactacgctttggacgtc

SEQ ID NO: 488 - protein, 17 aa, synthetic construct
  REGION 1..17: note = Description of Artificial Sequence: Synthetic peptide
AKDMSGYAHYYYYALDV

SEQ ID NO: 489 - DNA, 324 bp, synthetic construct
  misc_feature 1..324: note = Description of Artificial Sequence: Synthetic polynucleotide
  source 1..324: mol_type = other DNA
gacatccagatgacccagtctccatcctccctgtctgcatctgtaggagacagagtcaccatcacttgccgggcaagtcagagcattagcaactatttaaattggtatcagcagaaaccagggaaagcccctaagctcctgatctatgctgcatccagtttgcaaagtggggtcccatcaaggttcagtggcagtggatctgggacagatttcactctcaccatcagcagtctgcaacctgaagattttgcaacttactactgtcaacagagttacagtaaccccccgatcaccttcggccaagggacacgactggagattaaa

SEQ ID NO: 490 - protein, 108 aa, synthetic construct
  REGION 1..108: note = Description of Artificial Sequence: Synthetic polypeptide
DIQMTQSPSSLSASVGDRVTITCRASQSISNYLNWYQQKPGKAPKLLIYAASSLQSGVPSRFSGSGSGTDFTLTISSLQPEDFATYYCQQSYSNPPITFGQGTRLEIK

SEQ ID NO: 491 - DNA, 18 bp, synthetic construct
  misc_feature 1..18: note = Description of Artificial Sequence: Synthetic oligonucleotide
  source 1..18: mol_type = other DNA
cagagcattagcaactat

SEQ ID NO: 492 - protein, 6 aa, synthetic construct
  REGION 1..6: note = Description of Artificial Sequence: Synthetic peptide
QSISNY

SEQ ID NO: 493-494 - skipped (2 entries)

SEQ ID NO: 495 - DNA, 30 bp, synthetic construct
  misc_feature 1..30: note = Description of Artificial Sequence: Synthetic oligonucleotide
  source 1..30: mol_type = other DNA
caacagagttacagtaaccccccgatcacc

SEQ ID NO: 496 - protein, 10 aa, synthetic construct
  REGION 1..10: note = Description of Artificial Sequence: Synthetic peptide
QQSYSNPPIT

SEQ ID NO: 497 - DNA, 363 bp, synthetic construct
  misc_feature 1..363: note = Description of Artificial Sequence: Synthetic polynucleotide
  source 1..363: mol_type = other DNA
caggtgcagctggtggagtctgggggaggcgtggtccagcctgggaggtccctgagactctcctgtgcagcctctggattcaccttcagtagaaaaggcatgcactgggtccgccaggctccagtcaaggggctggagtgggtggcagttatatcatatgatggaagtaataaatactatgcagactccgtgaagggccgattcaccatctccagagacaattccaagaacacgctgtatctgcaaatgaacagcctgacagctgaggacacggctgtgtattactgtgcgaaagaaggggggcatgactatggtggtacctttgactactggggccagggaaccctggtcaccgtctcctca

SEQ ID NO: 498 - protein, 121 aa, synthetic construct
  REGION 1..121: note = Description of Artificial Sequence: Synthetic polypeptide
QVQLVESGGGVVQPGRSLRLSCAASGFTFSRKGMHWVRQAPVKGLEWVAVISYDGSNKYYADSVKGRFTISRDNSKNTLYLQMNSLTAEDTAVYYCAKEGGHDYGGTFDYWGQGTLVTVSS

SEQ ID NO: 499 - DNA, 24 bp, synthetic construct
  misc_feature 1..24: note = Description of Artificial Sequence: Synthetic oligonucleotide
  source 1..24: mol_type = other DNA
ggattcaccttcagtagaaaaggc

SEQ ID NO: 500 - protein, 8 aa, synthetic construct
  REGION 1..8: note = Description of Artificial Sequence: Synthetic peptide
GFTFSRKG

SEQ ID NO: 501 - DNA, 24 bp, synthetic construct
  misc_feature 1..24: note = Description of Artificial Sequence: Synthetic oligonucleotide
  source 1..24: mol_type = other DNA
atatcatatgatggaagtaataaa

SEQ ID NO: 502 - protein, 8 aa, synthetic construct
  REGION 1..8: note = Description of Artificial Sequence: Synthetic peptide
ISYDGSNK

SEQ ID NO: 503 - DNA, 42 bp, synthetic construct
  misc_feature 1..42: note = Description of Artificial Sequence: Synthetic oligonucleotide
  source 1..42: mol_type = other DNA
gcgaaagaaggggggcatgactatggtggtacctttgactac

SEQ ID NO: 504 - protein, 14 aa, synthetic construct
  REGION 1..14: note = Description of Artificial Sequence: Synthetic peptide
AKEGGHDYGGTFDY

SEQ ID NO: 505 - DNA, 321 bp, synthetic construct
  misc_feature 1..321: note = Description of Artificial Sequence: Synthetic polynucleotide
  source 1..321: mol_type = other DNA
gacatccagatgacccagtctccatcctccctgtctgcatctgtaggagacagagtcaccatcacttgccaggcgagtcaggacattaacaactatttaaattggtatcagcagaaaccagggaaagcccctaagttcctgatctacgatgcatccaatttggaaacaggggtcccatcaaggttcagtggaagtggatctgggacagattttactttcaccatcagcagcctgcagcctgaagatattgcaacatattactgtcaacagtatgatgatctcccattcactttcggccctgggaccaaagtggatatcaaa

SEQ ID NO: 506 - protein, 107 aa, synthetic construct
  REGION 1..107: note = Description of Artificial Sequence: Synthetic polypeptide
DIQMTQSPSSLSASVGDRVTITCQASQDINNYLNWYQQKPGKAPKFLIYDASNLETGVPSRFSGSGSGTDFTFTISSLQPEDIATYYCQQYDDLPFTFGPGTKVDIK

SEQ ID NO: 507 - DNA, 18 bp, synthetic construct
  misc_feature 1..18: note = Description of Artificial Sequence: Synthetic oligonucleotide
  source 1..18: mol_type = other DNA
caggacattaacaactat

SEQ ID NO: 508 - protein, 6 aa, synthetic construct
  REGION 1..6: note = Description of Artificial Sequence: Synthetic peptide
QDINNY

SEQ ID NO: 509-510 - skipped (2 entries)

SEQ ID NO: 511 - DNA, 27 bp, synthetic construct
  misc_feature 1..27: note = Description of Artificial Sequence: Synthetic oligonucleotide
  source 1..27: mol_type = other DNA
caacagtatgatgatctcccattcact

SEQ ID NO: 512 - protein, 9 aa, synthetic construct
  REGION 1..9: note = Description of Artificial Sequence: Synthetic peptide
QQYDDLPFT

SEQ ID NO: 513 - DNA, 369 bp, synthetic construct
  misc_feature 1..369: note = Description of Artificial Sequence: Synthetic polynucleotide
  source 1..369: mol_type = other DNA
gaagtgcagctggtggagtctgggggaggcttggtacagcctggcaggtccctgagactctcctgtgcagcctctggattcacctttgatgattataccatgcactgggtccggcaagctccagggaagggcctggagtgggtctcaggtattagttggaatagtggtagtataggctatgcggactctgtgaagggccgattcaccatctccagagacaacgccaagaagtccctgtatctgcaaatgaacagtctgagagctgaggacacggccttgtattactgtgcaaaagataatagtggctacggtcactactactacggaatggacgtctggggccaagggaccacggtcaccgtcgcctca

SEQ ID NO: 514 - protein, 123 aa, synthetic construct
  REGION 1..123: note = Description of Artificial Sequence: Synthetic polypeptide
EVQLVESGGGLVQPGRSLRLSCAASGFTFDDYTMHWVRQAPGKGLEWVSGISWNSGSIGYADSVKGRFTISRDNAKKSLYLQMNSLRAEDTALYYCAKDNSGYGHYYYGMDVWGQGTTVTVAS

SEQ ID NO: 515 - DNA, 24 bp, synthetic construct
  misc_feature 1..24: note = Description of Artificial Sequence: Synthetic oligonucleotide
  source 1..24: mol_type = other DNA
ggattcacctttgatgattatacc

SEQ ID NO: 516 - protein, 8 aa, synthetic construct
  REGION 1..8: note = Description of Artificial Sequence: Synthetic peptide
GFTFDDYT

SEQ ID NO: 517 - DNA, 24 bp, synthetic construct
  misc_feature 1..24: note = Description of Artificial Sequence: Synthetic oligonucleotide
  source 1..24: mol_type = other DNA
attagttggaatagtggtagtata

SEQ ID NO: 518 - protein, 8 aa, synthetic construct
  REGION 1..8: note = Description of Artificial Sequence: Synthetic peptide
ISWNSGSI

SEQ ID NO: 519 - DNA, 48 bp, synthetic construct
  misc_feature 1..48: note = Description of Artificial Sequence: Synthetic oligonucleotide
  source 1..48: mol_type = other DNA
gcaaaagataatagtggctacggtcactactactacggaatggacgtc

SEQ ID NO: 520 - protein, 16 aa, synthetic construct
  REGION 1..16: note = Description of Artificial Sequence: Synthetic peptide
AKDNSGYGHYYYGMDV

SEQ ID NO: 521 - DNA, 321 bp, synthetic construct
  misc_feature 1..321: note = Description of Artificial Sequence: Synthetic polynucleotide
  source 1..321: mol_type = other DNA
gaaatagtgatgacgcagtctccagccaccctgtctgtgtctccaggggaaagagccaccctctcctgcagggccagtcagagtgttagcagcaacttagcctggtaccagcaaaaacctggccaggctcccaggctcctcatctatggtgcatccaccagggccactggtatcccagccaggttcagtggcagtgggtctgggacagagttcactctcaccatcagcagcctgcagtctgaagattttgcagtttattactgtcagcactatattaactggcctctcactttcggcggagggaccaaggtggagatcaaa

SEQ ID NO: 522 - protein, 107 aa, synthetic construct
  REGION 1..107: note = Description of Artificial Sequence: Synthetic polypeptide
EIVMTQSPATLSVSPGERATLSCRASQSVSSNLAWYQQKPGQAPRLLIYGASTRATGIPARFSGSGSGTEFTLTISSLQSEDFAVYYCQHYINWPLTFGGGTKVEIK

SEQ ID NO: 523 - DNA, 18 bp, synthetic construct
  misc_feature 1..18: note = Description of Artificial Sequence: Synthetic oligonucleotide
  source 1..18: mol_type = other DNA
cagagtgttagcagcaac

SEQ ID NO: 524 - protein, 6 aa, synthetic construct
  REGION 1..6: note = Description of Artificial Sequence: Synthetic peptide
QSVSSN

SEQ ID NO: 525-526 - skipped (2 entries)

SEQ ID NO: 527 - DNA, 27 bp, synthetic construct
  misc_feature 1..27: note = Description of Artificial Sequence: Synthetic oligonucleotide
  source 1..27: mol_type = other DNA
cagcactatattaactggcctctcact

SEQ ID NO: 528 - protein, 9 aa, synthetic construct
  REGION 1..9: note = Description of Artificial Sequence: Synthetic peptide
QHYINWPLT

SEQ ID NO: 529 - DNA, 369 bp, synthetic construct; identical to SEQ ID NO: 513
  misc_feature 1..369: note = Description of Artificial Sequence: Synthetic polynucleotide
  source 1..369: mol_type = other DNA

SEQ ID NO: 530 - protein, 123 aa, synthetic construct; identical to SEQ ID NO: 514
  REGION 1..123: note = Description of Artificial Sequence: Synthetic polypeptide

SEQ ID NO: 531 - DNA, 24 bp, synthetic construct
  misc_feature 1..24: note = Description of Artificial Sequence: Synthetic oligonucleotide
  source 1..24: mol_type = other DNA
ggattcacctttgatgattatacc

SEQ ID NO: 532 - protein, 8 aa, synthetic construct
  REGION 1..8: note = Description of Artificial Sequence: Synthetic peptide
GFTFDDYT

SEQ ID NO: 533 - DNA, 24 bp, synthetic construct
  misc_feature 1..24: note = Description of Artificial Sequence: Synthetic oligonucleotide
  source 1..24: mol_type = other DNA
attagttggaatagtggtagtata

SEQ ID NO: 534 - protein, 8 aa, synthetic construct
  REGION 1..8: note = Description of Artificial Sequence: Synthetic peptide
ISWNSGSI

SEQ ID NO: 535 - DNA, 48 bp, synthetic construct; identical to SEQ ID NO: 519
  misc_feature 1..48: note = Description of Artificial Sequence: Synthetic oligonucleotide
  source 1..48: mol_type = other DNA

SEQ ID NO: 536 - protein, 16 aa, synthetic construct
  REGION 1..16: note = Description of Artificial Sequence: Synthetic peptide
AKDNSGYGHYYYGMDV

SEQ ID NO: 537 - DNA, 321 bp, synthetic construct; identical to SEQ ID NO: 521
  misc_feature 1..321: note = Description of Artificial Sequence: Synthetic polynucleotide
  source 1..321: mol_type = other DNA

SEQ ID NO: 538 - protein, 107 aa, synthetic construct; identical to SEQ ID NO: 522
  REGION 1..107: note = Description of Artificial Sequence: Synthetic polypeptide

SEQ ID NO: 539 - DNA, 18 bp, synthetic construct
  misc_feature 1..18: note = Description of Artificial Sequence: Synthetic oligonucleotide
  source 1..18: mol_type = other DNA
cagagtgttagcagcaac

SEQ ID NO: 540 - protein, 6 aa, synthetic construct
  REGION 1..6: note = Description of Artificial Sequence: Synthetic peptide
QSVSSN

SEQ ID NO: 541-542 - skipped (2 entries)

SEQ ID NO: 543 - DNA, 27 bp, synthetic construct
  misc_feature 1..27: note = Description of Artificial Sequence: Synthetic oligonucleotide
  source 1..27: mol_type = other DNA
cagcactatattaactggcctctcact

SEQ ID NO: 544 - protein, 9 aa, synthetic construct
  REGION 1..9: note = Description of Artificial Sequence: Synthetic peptide
QHYINWPLT

SEQ ID NO: 545 - DNA, 354 bp, synthetic construct
  misc_feature 1..354: note = Description of Artificial Sequence: Synthetic polynucleotide
  source 1..354: mol_type = other DNA
caggtgcagttggtggagtctgggggaggcgtggtccagcctgggaggtccctgagactctcctgtggtgcgtctggattcaccttcagaagttatggcatgcactgggtccgccagactccaggcagggggctggagtgggtggcaatgatatattatgatggaaataataaatactatgcagactccgtgaggggccgattcaccgtttccagagacaattccaagaacaccctgtatctgcaaatgagcagcctgagagccgaggacacggctctatatttctgtgcgcgagggcctgggtacaactggctcgacccctggggccagggaaccctggtcaccgtctcctca

SEQ ID NO: 546 - protein, 118 aa, synthetic construct
  REGION 1..118: note = Description of Artificial Sequence: Synthetic polypeptide
QVQLVESGGGVVQPGRSLRLSCGASGFTFRSYGMHWVRQTPGRGLEWVAMIYYDGNNKYYADSVRGRFTVSRDNSKNTLYLQMSSLRAEDTALYFCARGPGYNWLDPWGQGTLVTVSS

SEQ ID NO: 547 - DNA, 24 bp, synthetic construct
  misc_feature 1..24: note = Description of Artificial Sequence: Synthetic oligonucleotide
  source 1..24: mol_type = other DNA
ggattcaccttcagaagttatggc

SEQ ID NO: 548 - protein, 8 aa, synthetic construct
  REGION 1..8: note = Description of Artificial Sequence: Synthetic peptide
GFTFRSYG

SEQ ID NO: 549 - DNA, 24 bp, synthetic construct
  misc_feature 1..24: note = Description of Artificial Sequence: Synthetic oligonucleotide
  source 1..24: mol_type = other DNA
atatattatgatggaaataataaa

SEQ ID NO: 550 - protein, 8 aa, synthetic construct
  REGION 1..8: note = Description of Artificial Sequence: Synthetic peptide
IYYDGNNK

SEQ ID NO: 551 - DNA, 33 bp, synthetic construct
  misc_feature 1..33: note = Description of Artificial Sequence: Synthetic oligonucleotide
  source 1..33: mol_type = other DNA
gcgcgagggcctgggtacaactggctcgacccc

SEQ ID NO: 552 - protein, 11 aa, synthetic construct
  REGION 1..11: note = Description of Artificial Sequence: Synthetic peptide
ARGPGYNWLDP

SEQ ID NO: 553 - DNA, 321 bp, synthetic construct
  misc_feature 1..321: note = Description of Artificial Sequence: Synthetic polynucleotide
  source 1..321: mol_type = other DNA
gaaatagtgatgacgcagtctccagccaccctgtctgtgtctccaggggaaagagccaccctctcctgcagggccagtcagagtattagcaggaacttggcctggtaccagcaraaacctggccaggctcccaggctcctcatctatggtgcatccaccagggccactggtatcccagccaggttcagtggcagtgggtctgggacagagttcactctcaccatcagcagcctgcagtctgaagattttgcagtttattactgtcagcagtataataaccggcctctcactttcggcggagggaccgaggtggagatcaaa

SEQ ID NO: 554 - protein, 107 aa, synthetic construct
  REGION 1..107: note = Description of Artificial Sequence: Synthetic polypeptide
  VARIANT 38: note = MOD_RES - Any amino acid
EIVMTQSPATLSVSPGERATLSCRASQSISRNLAWYQXKPGQAPRLLIYGASTRATGIPARFSGSGSGTEFTLTISSLQSEDFAVYYCQQYNNRPLTFGGGTEVEIK

SEQ ID NO: 555 - DNA, 18 bp, synthetic construct
  misc_feature 1..18: note = Description of Artificial Sequence: Synthetic oligonucleotide
  source 1..18: mol_type = other DNA
cagagtattagcaggaac

SEQ ID NO: 556 - protein, 6 aa, synthetic construct
  REGION 1..6: note = Description of Artificial Sequence: Synthetic peptide
QSISRN

SEQ ID NO: 557-558 - skipped (2 entries)

SEQ ID NO: 559 - DNA, 27 bp, synthetic construct
  misc_feature 1..27: note = Description of Artificial Sequence: Synthetic oligonucleotide
  source 1..27: mol_type = other DNA
cagcagtataataaccggcctctcact

SEQ ID NO: 560 - protein, 9 aa, synthetic construct
  REGION 1..9: note = Description of Artificial Sequence: Synthetic peptide
QQYNNRPLT

SEQ ID NO: 561 - DNA, 354 bp, synthetic construct
  misc_feature 1..354: note = Description of Artificial Sequence: Synthetic polynucleotide
  source 1..354: mol_type = other DNA
caggtgcagttggtggagtctgggggaggcgtggtccagcctgggaggtccctgagactcgcctgtgttgcgtctggattcaccttcagaagttatggcatgcactgggtccgccaggctccaggcaagggactgcagtgggtggcaatgatttactatgatggtaagaataaatattatgcagactccgtgaggggccgattcaccatctccagagacaattccaagaacacactgtatctgcaaatgaacaatctgagagtcgaggacacggctatgtatttctgtgcgcgagggcctgggtacaattggctcgacccctggggccagggaaccctggtcactgtttcctca

SEQ ID NO: 562 - protein, 118 aa, synthetic construct
  REGION 1..118: note = Description of Artificial Sequence: Synthetic polypeptide
QVQLVESGGGVVQPGRSLRLACVASGFTFRSYGMHWVRQAPGKGLQWVAMIYYDGKNKYYADSVRGRFTISRDNSKNTLYLQMNNLRVEDTAMYFCARGPGYNWLDPWGQGTLVTVSS

SEQ ID NO: 563 - DNA, 24 bp, synthetic construct
  misc_feature 1..24: note = Description of Artificial Sequence: Synthetic oligonucleotide
  source 1..24: mol_type = other DNA
ggattcaccttcagaagttatggc

SEQ ID NO: 564 - protein, 8 aa, synthetic construct
  REGION 1..8: note = Description of Artificial Sequence: Synthetic peptide
GFTFRSYG

SEQ ID NO: 565 - DNA, 24 bp, synthetic construct
  misc_feature 1..24: note = Description of Artificial Sequence: Synthetic oligonucleotide
  source 1..24: mol_type = other DNA
atttactatgatggtaagaataaa

SEQ ID NO: 566 - protein, 8 aa, synthetic construct
  REGION 1..8: note = Description of Artificial Sequence: Synthetic peptide
IYYDGKNK

SEQ ID NO: 567 - DNA, 33 bp, synthetic construct
  misc_feature 1..33: note = Description of Artificial Sequence: Synthetic oligonucleotide
  source 1..33: mol_type = other DNA
gcgcgagggcctgggtacaattggctcgacccc

SEQ ID NO: 568 - protein, 11 aa, synthetic construct
  REGION 1..11: note = Description of Artificial Sequence: Synthetic peptide
ARGPGYNWLDP

SEQ ID NO: 569 - DNA, 321 bp, synthetic construct
  misc_feature 1..321: note = Description of Artificial Sequence: Synthetic polynucleotide
  source 1..321: mol_type = other DNA
gaaatagtgatgacgcagtctccagccaccctgtctgtgtctccaggggaaagagccaccctctcctgcagggccagtcagagaattagcagcaacttggcctggtaccagcaaaaacctggccaggctcccaggctcctcatctatggtgcatccaccagggccactggtagcccagccaggttcagtggcagtgggtctgggacagacttcactctcaccatcagcagcctgcagtctgaggatgttgcagtttattactgtcagcaacatcataactggcctctcactttcggcggagggaccaaggtggagatcaaa

SEQ ID NO: 570 - protein, 107 aa, synthetic construct
  REGION 1..107: note = Description of Artificial Sequence: Synthetic polypeptide
EIVMTQSPATLSVSPGERATLSCRASQRISSNLAWYQQKPGQAPRLLIYGASTRATGSPARFSGSGSGTDFTLTISSLQSEDVAVYYCQQHHNWPLTFGGGTKVEIK

SEQ ID NO: 571 - DNA, 18 bp, synthetic construct
  misc_feature 1..18: note = Description of Artificial Sequence: Synthetic oligonucleotide
  source 1..18: mol_type = other DNA
cagagaattagcagcaac

SEQ ID NO: 572 - protein, 6 aa, synthetic construct
  REGION 1..6: note = Description of Artificial Sequence: Synthetic peptide
QRISSN

SEQ ID NO: 573-574 - skipped (2 entries)

SEQ ID NO: 575 - DNA, 27 bp, synthetic construct
  misc_feature 1..27: note = Description of Artificial Sequence: Synthetic oligonucleotide
  source 1..27: mol_type = other DNA
cagcaacatcataactggcctctcact

SEQ ID NO: 576 - protein, 9 aa, synthetic construct
  REGION 1..9: note = Description of Artificial Sequence: Synthetic peptide
QQHHNWPLT

SEQ ID NO: 577 - DNA, 354 bp, synthetic construct
  misc_feature 1..354: note = Description of Artificial Sequence: Synthetic polynucleotide
  source 1..354: mol_type = other DNA
caggtgcagctggtggagtctgggggaggcgtggtccagcctgggaggtccctgagactctcctgtgctgcgtctggatttaccttcagaagttatgccatgcactgggtccgccaggctccaggcaaggggctggagtgggtggcaatggtatactatgatggaaataatcaatactatgcagactccgtgaggggccgattcaccatctccagagacaattccaagaacacgctgtatctgcaaatgaacagcctgagagccgatgacacggctgtgtatttctgtgcgcgagggcctgggtacaactggctcgacccctggggccagggaaccctggtcaccgtctcctca

SEQ ID NO: 578 - protein, 118 aa, synthetic construct
  REGION 1..118: note = Description of Artificial Sequence: Synthetic polypeptide
QVQLVESGGGVVQPGRSLRLSCAASGFTFRSYAMHWVRQAPGKGLEWVAMVYYDGNNQYYADSVRGRFTISRDNSKNTLYLQMNSLRADDTAVYFCARGPGYNWLDPWGQGTLVTVSS

SEQ ID NO: 579 - DNA, 24 bp, synthetic construct
  misc_feature 1..24: note = Description of Artificial Sequence: Synthetic oligonucleotide
  source 1..24: mol_type = other DNA
ggatttaccttcagaagttatgcc

SEQ ID NO: 580 - protein, 8 aa, synthetic construct
  REGION 1..8: note = Description of Artificial Sequence: Synthetic peptide
GFTFRSYA

SEQ ID NO: 581 - DNA, 24 bp, synthetic construct
  misc_feature 1..24: note = Description of Artificial Sequence: Synthetic oligonucleotide
  source 1..24: mol_type = other DNA
gtatactatgatggaaataatcaa

SEQ ID NO: 582 - protein, 8 aa, synthetic construct
  REGION 1..8: note = Description of Artificial Sequence: Synthetic peptide
VYYDGNNQ

SEQ ID NO: 583 - DNA, 33 bp, synthetic construct; identical to SEQ ID NO: 551
  misc_feature 1..33: note = Description of Artificial Sequence: Synthetic oligonucleotide
  source 1..33: mol_type = other DNA

SEQ ID NO: 584 - protein, 11 aa, synthetic construct
  REGION 1..11: note = Description of Artificial Sequence: Synthetic peptide
ARGPGYNWLDP

SEQ ID NO: 585 - DNA, 321 bp, synthetic construct
  misc_feature 1..321: note = Description of Artificial Sequence: Synthetic polynucleotide
  source 1..321: mol_type = other DNA
gaaatagtgatgacgcagtctccagccaccctgtctgtgtctccaggggaaagagccaccctctcctgcagggccagtcagagtgttagcaggaacttggcctggtaccagcaaaaacctggccaggctcccaggctcctcatctatggtgcatccaccagggccactggtatcccggccaggttcagtggcagtgggtctgggacagacttcactctcaccatcagcagcctgcagtctgaagattttgcagtttattactgtcagcagtataataactggcctctcactttcggcggagggaccaaggtggtgatcaaa

SEQ ID NO: 586 - protein, 107 aa, synthetic construct
  REGION 1..107: note = Description of Artificial Sequence: Synthetic polypeptide
EIVMTQSPATLSVSPGERATLSCRASQSVSRNLAWYQQKPGQAPRLLIYGASTRATGIPARFSGSGSGTDFTLTISSLQSEDFAVYYCQQYNNWPLTFGGGTKVVIK

SEQ ID NO: 587 - DNA, 18 bp, synthetic construct
  misc_feature 1..18: note = Description of Artificial Sequence: Synthetic oligonucleotide
  source 1..18: mol_type = other DNA
cagagtgttagcaggaac

SEQ ID NO: 588 - protein, 6 aa, synthetic construct
  REGION 1..6: note = Description of Artificial Sequence: Synthetic peptide
QSVSRN

SEQ ID NO: 589-590 - skipped (2 entries)

SEQ ID NO: 591 - DNA, 27 bp, synthetic construct
  misc_feature 1..27: note = Description of Artificial Sequence: Synthetic oligonucleotide
  source 1..27: mol_type = other DNA
cagcagtataataactggcctctcact

SEQ ID NO: 592 - protein, 9 aa, synthetic construct
  REGION 1..9: note = Description of Artificial Sequence: Synthetic peptide
QQYNNWPLT

SEQ ID NO: 593 - DNA, 354 bp, synthetic construct
  misc_feature 1..354: note = Description of Artificial Sequence: Synthetic polynucleotide
  source 1..354: mol_type = other DNA
caggtgcagctggtggagtctgggggaggcgtggtccagcctgggaggtccctgagactctcctgtattgcgtctggatttaccttcagaagttatggcatgcactgggtccgccaggctccaggcaaggggctggagtgggtggcaatgatatattatgatggaaacaataaatactatgcagactccgtgaggggccgattcaccatctccagagacaactccaagaacacgctgtatctgcaaatgaacagcctgagagccgatgacacggctgtgtatttctgtgcgcgagggcctgggtacaactggctcgacccctggggccagggaaccctggtcaccgtctcctca

SEQ ID NO: 594 - protein, 118 aa, synthetic construct
  REGION 1..118: note = Description of Artificial Sequence: Synthetic polypeptide
QVQLVESGGGVVQPGRSLRLSCIASGFTFRSYGMHWVRQAPGKGLEWVAMIYYDGNNKYYADSVRGRFTISRDNSKNTLYLQMNSLRADDTAVYFCARGPGYNWLDPWGQGTLVTVSS

SEQ ID NO: 595 - DNA, 24 bp, synthetic construct
  misc_feature 1..24: note = Description of Artificial Sequence: Synthetic oligonucleotide
  source 1..24: mol_type = other DNA
ggatttaccttcagaagttatggc

SEQ ID NO: 596 - protein, 8 aa, synthetic construct
  REGION 1..8: note = Description of Artificial Sequence: Synthetic peptide
GFTFRSYG

SEQ ID NO: 597 - DNA, 24 bp, synthetic construct
  misc_feature 1..24: note = Description of Artificial Sequence: Synthetic oligonucleotide
  source 1..24: mol_type = other DNA
atatattatgatggaaacaataaa

SEQ ID NO: 598 - protein, 8 aa, synthetic construct
  REGION 1..8: note = Description of Artificial Sequence: Synthetic peptide
IYYDGNNK

SEQ ID NO: 599 - DNA, 33 bp, synthetic construct; identical to SEQ ID NO: 551
  misc_feature 1..33: note = Description of Artificial Sequence: Synthetic oligonucleotide
  source 1..33: mol_type = other DNA

SEQ ID NO: 600 - protein, 11 aa, synthetic construct
  REGION 1..11: note = Description of Artificial Sequence: Synthetic peptide
ARGPGYNWLDP

SEQ ID NO: 601 - DNA, 321 bp, synthetic construct
  misc_feature 1..321: note = Description of Artificial Sequence: Synthetic polynucleotide
  source 1..321: mol_type = other DNA
gaaatagtgatgacgcagtctccagccacactgtctgtgtctccaggggaaagagccaccctctcctgcagggccagtcagagtgttagcagcaacttggcctggtaccagcagaaacctggccaggctcccaggctcctcatctatggtgcatccaccagggccactggtatcccagccaggttcagtggcagtgggtctgggacagagttcactctcaccatcagcagcctgcagtctgaagattttgcagtttattactgtcagcagtataataacaggcctctcactttcggcggagggaccaaggtggagatcaaa

SEQ ID NO: 602 - protein, 107 aa, synthetic construct
  REGION 1..107: note = Description of Artificial Sequence: Synthetic polypeptide
EIVMTQSPATLSVSPGERATLSCRASQSVSSNLAWYQQKPGQAPRLLIYGASTRATGIPARFSGSGSGTEFTLTISSLQSEDFAVYYCQQYNNRPLTFGGGTKVEIK

SEQ ID NO: 603 - DNA, 18 bp, synthetic construct
  misc_feature 1..18: note = Description of Artificial Sequence: Synthetic oligonucleotide
  source 1..18: mol_type = other DNA
cagagtgttagcagcaac

SEQ ID NO: 604 - protein, 6 aa, synthetic construct
  REGION 1..6: note = Description of Artificial Sequence: Synthetic peptide
QSVSSN

SEQ ID NO: 605-606 - skipped (2 entries)

SEQ ID NO: 607 - DNA, 27 bp, synthetic construct
  misc_feature 1..27: note = Description of Artificial Sequence: Synthetic oligonucleotide
  source 1..27: mol_type = other DNA
cagcagtataataacaggcctctcact

SEQ ID NO: 608 - protein, 9 aa, synthetic construct
  REGION 1..9: note = Description of Artificial Sequence: Synthetic peptide
QQYNNRPLT

SEQ ID NO: 609 - DNA, 354 bp, synthetic construct
  misc_feature 1..354: note = Description of Artificial Sequence: Synthetic polynucleotide
  source 1..354: mol_type = other DNA
caggtgcagctggtggagtctgggggaggcgtggtccagccggggaggtccctgagactctcctgtgctgcgtctggattcaccttcagaagttttggcatgcactgggtccgccaggctccaggcaggggactggagtgggtggcaatgatatattttgatggaaaaaataaatactatgcagactccgtgaggggccgattcaccatttccagagacaattccaagaacaccctgtatctggaaatgagtagcctgagagccgaggacacggctgtatatttctgtgcgcgagggcctgggtacaactggctcgacccctggggccagggaaccctggtcaccgtctcctca

SEQ ID NO: 610 - protein, 118 aa, synthetic construct
  REGION 1..118: note = Description of Artificial Sequence: Synthetic polypeptide
QVQLVESGGGVVQPGRSLRLSCAASGFTFRSFGMHWVRQAPGRGLEWVAMIYFDGKNKYYADSVRGRFTISRDNSKNTLYLEMSSLRAEDTAVYFCARGPGYNWLDPWGQGTLVTVSS

SEQ ID NO: 611 - DNA, 24 bp, synthetic construct
  misc_feature 1..24: note = Description of Artificial Sequence: Synthetic oligonucleotide
  source 1..24: mol_type = other DNA
ggattcaccttcagaagttttggc

SEQ ID NO: 612 - protein, 8 aa, synthetic construct
  REGION 1..8: note = Description of Artificial Sequence: Synthetic peptide
GFTFRSFG

SEQ ID NO: 613 - DNA, 24 bp, synthetic construct
  misc_feature 1..24: note = Description of Artificial Sequence: Synthetic oligonucleotide
  source 1..24: mol_type = other DNA
atatattttgatggaaaaaataaa

SEQ ID NO: 614 - protein, 8 aa, synthetic construct
  REGION 1..8: note = Description of Artificial Sequence: Synthetic peptide
IYFDGKNK

SEQ ID NO: 615 - DNA, 33 bp, synthetic construct; identical to SEQ ID NO: 551
  misc_feature 1..33: note = Description of Artificial Sequence: Synthetic oligonucleotide
  source 1..33: mol_type = other DNA

SEQ ID NO: 616 - protein, 11 aa, synthetic construct
  REGION 1..11: note = Description of Artificial Sequence: Synthetic peptide
ARGPGYNWLDP

SEQ ID NO: 617 - DNA, 321 bp, synthetic construct
  misc_feature 1..321: note = Description of Artificial Sequence: Synthetic polynucleotide
  source 1..321: mol_type = other DNA
gaaatagtgatgacgcagtctccagccaccctgtctgtgtctccaggggaaagagtcaccctctcctgtagggccagtcagagtattagcaggaacttggcctggtaccagcagaaacctggccaggctcccaggctcctcatctatggtgcatccaccagggccactggtgtcccagccaggttcagtggcagtgggtctgggacagagttcactctcaccatcagcagcctacagtctgaagattttgcagtttttcactgtcagcagtataataataggcctctcactttcggcggagggaccgaggtggagatcaaa

SEQ ID NO: 618 - protein, 107 aa, synthetic construct
  REGION 1..107: note = Description of Artificial Sequence: Synthetic polypeptide
EIVMTQSPATLSVSPGERVTLSCRASQSISRNLAWYQQKPGQAPRLLIYGASTRATGVPARFSGSGSGTEFTLTISSLQSEDFAVFHCQQYNNRPLTFGGGTEVEIK

SEQ ID NO: 619 - DNA, 18 bp, synthetic construct
  misc_feature 1..18: note = Description of Artificial Sequence: Synthetic oligonucleotide
  source 1..18: mol_type = other DNA
cagagtattagcaggaac

SEQ ID NO: 620 - protein, 6 aa, synthetic construct
  REGION 1..6: note = Description of Artificial Sequence: Synthetic peptide
QSISRN

SEQ ID NO: 621-622 - skipped (2 entries)

SEQ ID NO: 623 - DNA, 27 bp, synthetic construct
  misc_feature 1..27: note = Description of Artificial Sequence: Synthetic oligonucleotide
  source 1..27: mol_type = other DNA
cagcagtataataataggcctctcact

SEQ ID NO: 624 - protein, 9 aa, synthetic construct
  REGION 1..9: note = Description of Artificial Sequence: Synthetic peptide
QQYNNRPLT

SEQ ID NO: 625 - DNA, 354 bp, synthetic construct
  misc_feature 1..354: note = Description of Artificial Sequence: Synthetic polynucleotide
  source 1..354: mol_type = other DNA
caggtgcaattggtggagtctgggggaggcgtggtccagccggggaggtccctgagactctcctgtgctgcgtctggattcaccttcagaagttttggcatgcactgggtccgccaggctccaggcaggggactggagtgggtggcaatgatatattttgatggaaaaaataaatactatgcagactccgtgaggggccgattcaccatttccagagacaattccaagaacaccctgtatctggaaatgagtagcctgagagccgaggacacggctgtatatttctgtgcgcgagggcctgggtacaactggctcgacccctggggccagggaaccctggtcaccgtctcctca

SEQ ID NO: 626 - protein, 118 aa, synthetic construct; identical to SEQ ID NO: 610
  REGION 1..118: note = Description of Artificial Sequence: Synthetic polypeptide

SEQ ID NO: 627 - DNA, 24 bp, synthetic construct
  misc_feature 1..24: note = Description of Artificial Sequence: Synthetic oligonucleotide
  source 1..24: mol_type = other DNA
ggattcaccttcagaagttttggc

SEQ ID NO: 628 - protein, 8 aa, synthetic construct
  REGION 1..8: note = Description of Artificial Sequence: Synthetic peptide
GFTFRSFG

SEQ ID NO: 629 - DNA, 24 bp, synthetic construct
  misc_feature 1..24: note = Description of Artificial Sequence: Synthetic oligonucleotide
  source 1..24: mol_type = other DNA
atatattttgatggaaaaaataaa

SEQ ID NO: 630 - protein, 8 aa, synthetic construct
  REGION 1..8: note = Description of Artificial Sequence: Synthetic peptide
IYFDGKNK

SEQ ID NO: 631 - DNA, 33 bp, synthetic construct; identical to SEQ ID NO: 551
  misc_feature 1..33: note = Description of Artificial Sequence: Synthetic oligonucleotide
  source 1..33: mol_type = other DNA

SEQ ID NO: 632 - protein, 11 aa, synthetic construct
  REGION 1..11: note = Description of Artificial Sequence: Synthetic peptide
ARGPGYNWLDP

SEQ ID NO: 633 - DNA, 321 bp, synthetic construct
  misc_feature 1..321: note = Description of Artificial Sequence: Synthetic polynucleotide
  source 1..321: mol_type = other DNA
gaaatagtgatgacgcagtctccagccaccctgtctgtgtctccaggggaaagagtcaccctctcctgtagggccagtcagagtattagcaggaacttggcctggtaccagcaraaacctggccaggctcccaggctcctcatctatggtgcatccaccagggccactggtgtcccagccaggttcagtggcagtgggtctgggacagagttcactctcaccatcagcagcctacagtctgaagattttgcagtttttcactgtcagcagtataataataggcctctcactttcggcggagggaccgaggtggagatcaaa

SEQ ID NO: 634 - protein, 107 aa, synthetic construct
  REGION 1..107: note = Description of Artificial Sequence: Synthetic polypeptide
  VARIANT 38: note = MOD_RES - Any amino acid
EIVMTQSPATLSVSPGERVTLSCRASQSISRNLAWYQXKPGQAPRLLIYGASTRATGVPARFSGSGSGTEFTLTISSLQSEDFAVFHCQQYNNRPLTFGGGTEVEIK

SEQ ID NO: 635 - DNA, 18 bp, synthetic construct
  misc_feature 1..18: note = Description of Artificial Sequence: Synthetic oligonucleotide
  source 1..18: mol_type = other DNA
cagagtattagcaggaac

SEQ ID NO: 636 - protein, 6 aa, synthetic construct
  REGION 1..6: note = Description of Artificial Sequence: Synthetic peptide
QSISRN

SEQ ID NO: 637-638 - skipped (2 entries)

SEQ ID NO: 639 - DNA, 27 bp, synthetic construct
  misc_feature 1..27: note = Description of Artificial Sequence: Synthetic oligonucleotide
  source 1..27: mol_type = other DNA
cagcagtataataataggcctctcact

SEQ ID NO: 640 - protein, 9 aa, synthetic construct
  REGION 1..9: note = Description of Artificial Sequence: Synthetic peptide
QQYNNRPLT

SEQ ID NO: 641 - DNA, 354 bp, synthetic construct
  misc_feature 1..354: note = Description of Artificial Sequence: Synthetic polynucleotide
  source 1..354: mol_type = other DNA
caggtgcaattggtggagtctgggggaggcgtggtccagccggggaggtccctgagactctcctgtgctgcgtctggattcaccttcagaagttttggcatgcactgggtccgccaggctccaggcaggggactggagtgggtggcaatgatatattttgatggaaaaaataaatactatgcagactccgtgaggggccgattcaccatttccagagacaattccaagaacaccctgtatctggaaatgagcagcctgagagccgaggacacggctgtatatttctgtgcgcgagggcctgggtacaattggctcgacccctggggccagggaaccctggtcaccgtctcctca

SEQ ID NO: 642 - protein, 118 aa, synthetic construct; identical to SEQ ID NO: 610
  REGION 1..118: note = Description of Artificial Sequence: Synthetic polypeptide

SEQ ID NO: 643 - DNA, 24 bp, synthetic construct
  misc_feature 1..24: note = Description of Artificial Sequence: Synthetic oligonucleotide
  source 1..24: mol_type = other DNA
ggattcaccttcagaagttttggc

SEQ ID NO: 644 - protein, 8 aa, synthetic construct
  REGION 1..8: note = Description of Artificial Sequence: Synthetic peptide
GFTFRSFG

SEQ ID NO: 645 - DNA, 24 bp, synthetic construct
  misc_feature 1..24: note = Description of Artificial Sequence: Synthetic oligonucleotide
  source 1..24: mol_type = other DNA
atatattttgatggaaaaaataaa

SEQ ID NO: 646 - protein, 8 aa, synthetic construct
  REGION 1..8: note = Description of Artificial Sequence: Synthetic peptide
IYFDGKNK

SEQ ID NO: 647 - DNA, 33 bp, synthetic construct; identical to SEQ ID NO: 567
  misc_feature 1..33: note = Description of Artificial Sequence: Synthetic oligonucleotide
  source 1..33: mol_type = other DNA

SEQ ID NO: 648 - protein, 11 aa, synthetic construct
  REGION 1..11: note = Description of Artificial Sequence: Synthetic peptide
ARGPGYNWLDP

SEQ ID NO: 649 - DNA, 321 bp, synthetic construct
  misc_feature 1..321: note = Description of Artificial Sequence: Synthetic polynucleotide
  source 1..321: mol_type = other DNA
gaaatagtgatgacgcagtctccagccaccctgtctgtgtctccaggggaaagagccaccctctcctgtagggccagtcagagtgttagcaggaacttggcctggtaccagcaaaaacctggccaggctcccaggctcctcatctatggtgcatccaccagggccactggtgtcccagccaggttcagtggcagtgggtctgggacagagttcactctcaccatcagcagcctacagtctgaagattttgcagtttttcactgtcagcagtataataataggcctctcactttcggcggagggaccgaggtggagatcaaa

SEQ ID NO: 650 - protein, 107 aa, synthetic construct
  REGION 1..107: note = Description of Artificial Sequence: Synthetic polypeptide
EIVMTQSPATLSVSPGERATLSCRASQSVSRNLAWYQQKPGQAPRLLIYGASTRATGVPARFSGSGSGTEFTLTISSLQSEDFAVFHCQQYNNRPLTFGGGTEVEIK

SEQ ID NO: 651 - DNA, 18 bp, synthetic construct
  misc_feature 1..18: note = Description of Artificial Sequence: Synthetic oligonucleotide
  source 1..18: mol_type = other DNA
cagagtgttagcaggaac

SEQ ID NO: 652 - protein, 6 aa, synthetic construct
  REGION 1..6: note = Description of Artificial Sequence: Synthetic peptide
QSVSRN

SEQ ID NO: 653-654 - skipped (2 entries)

SEQ ID NO: 655 - DNA, 27 bp, synthetic construct
  misc_feature 1..27: note = Description of Artificial Sequence: Synthetic oligonucleotide
  source 1..27: mol_type = other DNA
cagcagtataataataggcctctcact

SEQ ID NO: 656 - protein, 9 aa, synthetic construct
  REGION 1..9: note = Description of Artificial Sequence: Synthetic peptide
QQYNNRPLT

SEQ ID NO: 657 - DNA, 354 bp, synthetic construct; identical to SEQ ID NO: 641
  misc_feature 1..354: note = Description of Artificial Sequence: Synthetic polynucleotide
  source 1..354: mol_type = other DNA

SEQ ID NO: 658 - protein, 118 aa, synthetic construct; identical to SEQ ID NO: 610
  REGION 1..118: note = Description of Artificial Sequence: Synthetic polypeptide

SEQ ID NO: 659 - DNA, 24 bp, synthetic construct
  misc_feature 1..24: note = Description of Artificial Sequence: Synthetic oligonucleotide
  source 1..24: mol_type = other DNA
ggattcaccttcagaagttttggc

SEQ ID NO: 660 - protein, 8 aa, synthetic construct
  REGION 1..8: note = Description of Artificial Sequence: Synthetic peptide
GFTFRSFG

SEQ ID NO: 661 - DNA, 24 bp, synthetic construct
  misc_feature 1..24: note = Description of Artificial Sequence: Synthetic oligonucleotide
  source 1..24: mol_type = other DNA
atatattttgatggaaaaaataaa

SEQ ID NO: 662 - protein, 8 aa, synthetic construct
  REGION 1..8: note = Description of Artificial Sequence: Synthetic peptide
IYFDGKNK

SEQ ID NO: 663 - DNA, 33 bp, synthetic construct; identical to SEQ ID NO: 567
  misc_feature 1..33: note = Description of Artificial Sequence: Synthetic oligonucleotide
  source 1..33: mol_type = other DNA

SEQ ID NO: 664 - protein, 11 aa, synthetic construct
  REGION 1..11: note = Description of Artificial Sequence: Synthetic peptide
ARGPGYNWLDP

SEQ ID NO: 665 - DNA, 321 bp, synthetic construct; identical to SEQ ID NO: 649
  misc_feature 1..321: note = Description of Artificial Sequence: Synthetic polynucleotide
  source 1..321: mol_type = other DNA

SEQ ID NO: 666 - protein, 107 aa, synthetic construct; identical to SEQ ID NO: 650
  REGION 1..107: note = Description of Artificial Sequence: Synthetic polypeptide

SEQ ID NO: 667 - DNA, 18 bp, synthetic construct
  misc_feature 1..18: note = Description of Artificial Sequence: Synthetic oligonucleotide
  source 1..18: mol_type = other DNA
cagagtgttagcaggaac

SEQ ID NO: 668 - protein, 6 aa, synthetic construct
  REGION 1..6: note = Description of Artificial Sequence: Synthetic peptide
QSVSRN

SEQ ID NO: 669-670 - skipped (2 entries)

SEQ ID NO: 671 - DNA, 27 bp, synthetic construct
  misc_feature 1..27: note = Description of Artificial Sequence: Synthetic oligonucleotide
  source 1..27: mol_type = other DNA
cagcagtataataataggcctctcact

SEQ ID NO: 672 - protein, 9 aa, synthetic construct
  REGION 1..9: note = Description of Artificial Sequence: Synthetic peptide
QQYNNRPLT

SEQ ID NO: 673 - DNA, 354 bp, synthetic construct
  misc_feature 1..354: note = Description of Artificial Sequence: Synthetic polynucleotide
  source 1..354: mol_type = other DNA
caggtgcagttggtggagtctgggggaggcgtggtccagcctgggaggtccctgagactctcctgtgttgcgtctggattcaccttcagaagttatggcatgcactgggtccgccaggctccaggcaagggactgcagtgggtggcaatgatttactatgatggtaagaataaatattatgcagactccgtgaggggccgattcaccatctccagagacaattccaagaacacgctgtatctgcaaatgaacagtctgagagccgaagacacggctatgtatttctgtgcgcgagggcctgggtacaactggctcgacccctggggccagggaaccctggtcactgtctcctca

SEQ ID NO: 674 - protein, 118 aa, synthetic construct
  REGION 1..118: note = Description of Artificial Sequence: Synthetic polypeptide
QVQLVESGGGVVQPGRSLRLSCVASGFTFRSYGMHWVRQAPGKGLQWVAMIYYDGKNKYYADSVRGRFTISRDNSKNTLYLQMNSLRAEDTAMYFCARGPGYNWLDPWGQGTLVTVSS

SEQ ID NO: 675 - DNA, 24 bp, synthetic construct
  misc_feature 1..24: note = Description of Artificial Sequence: Synthetic oligonucleotide
  source 1..24: mol_type = other DNA
ggattcaccttcagaagttatggc

SEQ ID NO: 676 - protein, 8 aa, synthetic construct
  REGION 1..8: note = Description of Artificial Sequence: Synthetic peptide
GFTFRSYG

SEQ ID NO: 677 - DNA, 24 bp, synthetic construct
  misc_feature 1..24: note = Description of Artificial Sequence: Synthetic oligonucleotide
  source 1..24: mol_type = other DNA
atttactatgatggtaagaataaa

SEQ ID NO: 678 - protein, 8 aa, synthetic construct
  REGION 1..8: note = Description of Artificial Sequence: Synthetic peptide
IYYDGKNK

SEQ ID NO: 679 - DNA, 33 bp, synthetic construct; identical to SEQ ID NO: 551
  misc_feature 1..33: note = Description of Artificial Sequence: Synthetic oligonucleotide
  source 1..33: mol_type = other DNA

SEQ ID NO: 680 - protein, 11 aa, synthetic construct
  REGION 1..11: note = Description of Artificial Sequence: Synthetic peptide
ARGPGYNWLDP

SEQ ID NO: 681 - DNA, 321 bp, synthetic construct
  misc_feature 1..321: note = Description of Artificial Sequence: Synthetic polynucleotide
  source 1..321: mol_type = other DNA
gaaatagtgatgacgcagtctccagccaccctgtctgtgtctccaggggaaagagccaccctctcctgcagggccagtcagagaattagcagcaacttggcctggtaccagcaaaaacctggccaggctcccaggctcctcatctatggtgcatccaccagggccactggtagcccagccaggttcagtggcagtgggtctgggacagagttcactctcaccatcagcagcctgcagtctgaagatgttgcagtttattactgtcagcaacataataactggcctctcactttcggcggagggaccaaggtggagatcaaa

SEQ ID NO: 682 - protein, 107 aa, synthetic construct
  REGION 1..107: note = Description of Artificial Sequence: Synthetic polypeptide
EIVMTQSPATLSVSPGERATLSCRASQRISSNLAWYQQKPGQAPRLLIYGASTRATGSPARFSGSGSGTEFTLTISSLQSEDVAVYYCQQHNNWPLTFGGGTKVEIK

SEQ ID NO: 683 - DNA, 18 bp, synthetic construct
  misc_feature 1..18: note = Description of Artificial Sequence: Synthetic oligonucleotide
  source 1..18: mol_type = other DNA
cagagaattagcagcaac

SEQ ID NO: 684 - protein, 6 aa, synthetic construct
  REGION 1..6: note = Description of Artificial Sequence: Synthetic peptide
QRISSN

SEQ ID NO: 685-686 - skipped (2 entries)

SEQ ID NO: 687 - DNA, 27 bp, synthetic construct
  misc_feature 1..27: note = Description of Artificial Sequence: Synthetic oligonucleotide
  source 1..27: mol_type = other DNA
cagcaacataataactggcctctcact

SEQ ID NO: 688 - protein, 9 aa, synthetic construct
  REGION 1..9: note = Description of Artificial Sequence: Synthetic peptide
QQHNNWPLT

SEQ ID NO: 689 - DNA, 354 bp, synthetic construct
  misc_feature 1..354: note = Description of Artificial Sequence: Synthetic polynucleotide
  source 1..354: mol_type = other DNA
caggtgcaattggtggagtctgggggaggcgtggtccagccggggaggtccctgagactctcctgtgctgcgtctggtttcaccttcagaagttttggcatgcactgggtccgccaggctccaggcaggggactggagtgggtggcaatgatatattttgatggaaaaaataaatactatgcagactccgtgaggggccgattcaccatttccagagacaattccaagaacaccctgtatctggaaatgagtagcctgagagccgaggacacggctgtatatttctgtgcgcgagggcctgggtacaactggctcgacccctggggccagggaaccctggtcaccgtctcctca

SEQ ID NO: 690 - protein, 118 aa, synthetic construct; identical to SEQ ID NO: 610
  REGION 1..118: note = Description of Artificial Sequence: Synthetic polypeptide

SEQ ID NO: 691 - DNA, 24 bp, synthetic construct
  misc_feature 1..24: note = Description of Artificial Sequence: Synthetic oligonucleotide
  source 1..24: mol_type = other DNA
ggtttcaccttcagaagttttggc

SEQ ID NO: 692 - protein, 8 aa, synthetic construct
  REGION 1..8: note = Description of Artificial Sequence: Synthetic peptide
GFTFRSFG

SEQ ID NO: 693 - DNA, 24 bp, synthetic construct
  misc_feature 1..24: note = Description of Artificial Sequence: Synthetic oligonucleotide
  source 1..24: mol_type = other DNA
atatattttgatggaaaaaataaa

SEQ ID NO: 694 - protein, 8 aa, synthetic construct
  REGION 1..8: note = Description of Artificial Sequence: Synthetic peptide
IYFDGKNK

SEQ ID NO: 695 - DNA, 33 bp, synthetic construct; identical to SEQ ID NO: 551
  misc_feature 1..33: note = Description of Artificial Sequence: Synthetic oligonucleotide
  source 1..33: mol_type = other DNA

SEQ ID NO: 696 - protein, 11 aa, synthetic construct
  REGION 1..11: note = Description of Artificial Sequence: Synthetic peptide
ARGPGYNWLDP

SEQ ID NO: 697 - DNA, 321 bp, synthetic construct
  misc_feature 1..321: note = Description of Artificial Sequence: Synthetic polynucleotide
  source 1..321: mol_type = other DNA
gaaatagtgatgacgcagtctccagccaccctgtctgtgtctccaggggaaagagtcatcctctcctgtagggccagtcagagtattagcaggaacttggcctggtaccagcaaaaacctggccaggctcccaggctcctcatctatggtgcaaccaccagggccactggtgtcccagccaggttcagtggcagtgggtctgggacagagttcactctcaccatcagcagcctacagtctgaagattttgcagttttttactgtcagcagtataataataggcctctcactttcggcggagggaccgaggtggagatcaaa

SEQ ID NO: 698 - protein, 107 aa, synthetic construct
  REGION 1..107: note = Description of Artificial Sequence: Synthetic polypeptide
EIVMTQSPATLSVSPGERVILSCRASQSISRNLAWYQQKPGQAPRLLIYGATTRATGVPARFSGSGSGTEFTLTISSLQSEDFAVFYCQQYNNRPLTFGGGTEVEIK

SEQ ID NO: 699 - DNA, 18 bp, synthetic construct
  misc_feature 1..18: note = Description of Artificial Sequence: Synthetic oligonucleotide
  source 1..18: mol_type = other DNA
cagagtattagcaggaac

SEQ ID NO: 700 - protein, 6 aa, synthetic construct
  REGION 1..6: note = Description of Artificial Sequence: Synthetic peptide
QSISRN

SEQ ID NO: 701-702 - skipped (2 entries)

SEQ ID NO: 703 - DNA, 27 bp, synthetic construct
  misc_feature 1..27: note = Description of Artificial Sequence: Synthetic oligonucleotide
  source 1..27: mol_type = other DNA
cagcagtataataataggcctctcact

SEQ ID NO: 704 - protein, 9 aa, synthetic construct
  REGION 1..9: note = Description of Artificial Sequence: Synthetic peptide
QQYNNRPLT

SEQ ID NO: 705 - DNA, 354 bp, synthetic construct; identical to SEQ ID NO: 689
  misc_feature 1..354: note = Description of Artificial Sequence: Synthetic polynucleotide
  source 1..354: mol_type = other DNA

SEQ ID NO: 706 - protein, 118 aa, synthetic construct; identical to SEQ ID NO: 610
  REGION 1..118: note = Description of Artificial Sequence: Synthetic polypeptide

SEQ ID NO: 707 - DNA, 24 bp, synthetic construct
  misc_feature 1..24: note = Description of Artificial Sequence: Synthetic oligonucleotide
  source 1..24: mol_type = other DNA
ggtttcaccttcagaagttttggc

SEQ ID NO: 708 - protein, 8 aa, synthetic construct
  REGION 1..8: note = Description of Artificial Sequence: Synthetic peptide
GFTFRSFG

SEQ ID NO: 709 - DNA, 24 bp, synthetic construct
  misc_feature 1..24: note = Description of Artificial Sequence: Synthetic oligonucleotide
  source 1..24: mol_type = other DNA
atatattttgatggaaaaaataaa

SEQ ID NO: 710 - protein, 8 aa, synthetic construct
  REGION 1..8: note = Description of Artificial Sequence: Synthetic peptide
IYFDGKNK

SEQ ID NO: 711 - DNA, 33 bp, synthetic construct; identical to SEQ ID NO: 551
  misc_feature 1..33: note = Description of Artificial Sequence: Synthetic oligonucleotide
  source 1..33: mol_type = other DNA

SEQ ID NO: 712 - protein, 11 aa, synthetic construct
  REGION 1..11: note = Description of Artificial Sequence: Synthetic peptide
ARGPGYNWLDP

SEQ ID NO: 713 - DNA, 321 bp, synthetic construct
  misc_feature 1..321: note = Description of Artificial Sequence: Synthetic polynucleotide
  source 1..321: mol_type = other DNA
gaaatagtgatgacgcagtctccagccaccctgtctgtgtctccaggggaaagagtcatcctctcctgtagggccagtcagagtattagcaggaacttggcctggtaccagcaraaacctggccaggctcccaggctcctcatctatggtgcaaccaccagggccactggtgtcccagccaggttcagtggcagtgggtctgggacagagttcactctcaccatcagcagcctacagtctgaagattttgcagttttttactgtcagcagtataataataggcctctcactttcggcggagggaccgaggtggagatcaaa

SEQ ID NO: 714 - protein, 107 aa, synthetic construct
  REGION 1..107: note = Description of Artificial Sequence: Synthetic polypeptide
  VARIANT 38: note = MOD_RES - Any amino acid
EIVMTQSPATLSVSPGERVILSCRASQSISRNLAWYQXKPGQAPRLLIYGATTRATGVPARFSGSGSGTEFTLTISSLQSEDFAVFYCQQYNNRPLTFGGGTEVEIK

SEQ ID NO: 715 - DNA, 18 bp, synthetic construct
  misc_feature 1..18: note = Description of Artificial Sequence: Synthetic oligonucleotide
  source 1..18: mol_type = other DNA
cagagtattagcaggaac

SEQ ID NO: 716 - protein, 6 aa, synthetic construct
  REGION 1..6: note = Description of Artificial Sequence: Synthetic peptide
QSISRN

SEQ ID NO: 717-718 - skipped (2 entries)

SEQ ID NO: 719 - DNA, 27 bp, synthetic construct
  misc_feature 1..27: note = Description of Artificial Sequence: Synthetic oligonucleotide
  source 1..27: mol_type = other DNA
cagcagtataataataggcctctcact

SEQ ID NO: 720 - protein, 9 aa, synthetic construct
  REGION 1..9: note = Description of Artificial Sequence: Synthetic peptide
QQYNNRPLT

SEQ ID NO: 721 - DNA, 354 bp, synthetic construct; identical to SEQ ID NO: 593
  misc_feature 1..354: note = Description of Artificial Sequence: Synthetic polynucleotide
  source 1..354: mol_type = other DNA

SEQ ID NO: 722 - protein, 118 aa, synthetic construct; identical to SEQ ID NO: 594
  REGION 1..118: note = Description of Artificial Sequence: Synthetic polypeptide

SEQ ID NO: 723 - DNA, 24 bp, synthetic construct
  misc_feature 1..24: note = Description of Artificial Sequence: Synthetic oligonucleotide
  source 1..24: mol_type = other DNA
ggatttaccttcagaagttatggc

SEQ ID NO: 724 - protein, 8 aa, synthetic construct
  REGION 1..8: note = Description of Artificial Sequence: Synthetic peptide
GFTFRSYG

SEQ ID NO: 725 - DNA, 24 bp, synthetic construct
  misc_feature 1..24: note = Description of Artificial Sequence: Synthetic oligonucleotide
  source 1..24: mol_type = other DNA
atatattatgatggaaacaataaa

SEQ ID NO: 726 - protein, 8 aa, synthetic construct
  REGION 1..8: note = Description of Artificial Sequence: Synthetic peptide
IYYDGNNK

SEQ ID NO: 727 - DNA, 33 bp, synthetic construct; identical to SEQ ID NO: 551
  misc_feature 1..33: note = Description of Artificial Sequence: Synthetic oligonucleotide
  source 1..33: mol_type = other DNA

SEQ ID NO: 728 - protein, 11 aa, synthetic construct
  REGION 1..11: note = Description of Artificial Sequence: Synthetic peptide
ARGPGYNWLDP

SEQ ID NO: 729 - DNA, 321 bp, synthetic construct; identical to SEQ ID NO: 601
  misc_feature 1..321: note = Description of Artificial Sequence: Synthetic polynucleotide
  source 1..321: mol_type = other DNA

SEQ ID NO: 730 - protein, 107 aa, synthetic construct; identical to SEQ ID NO: 602
  REGION 1..107: note = Description of Artificial Sequence: Synthetic polypeptide

SEQ ID NO: 731 - DNA, 18 bp, synthetic construct
  misc_feature 1..18: note = Description of Artificial Sequence: Synthetic oligonucleotide
  source 1..18: mol_type = other DNA
cagagtgttagcagcaac

SEQ ID NO: 732 - protein, 6 aa, synthetic construct
  REGION 1..6: note = Description of Artificial Sequence: Synthetic peptide
QSVSSN

SEQ ID NO: 733-734 - skipped (2 entries)

SEQ ID NO: 735 - DNA, 27 bp, synthetic construct
  misc_feature 1..27: note = Description of Artificial Sequence: Synthetic oligonucleotide
  source 1..27: mol_type = other DNA
cagcagtataataacaggcctctcact

SEQ ID NO: 736 - protein, 9 aa, synthetic construct
  REGION 1..9: note = Description of Artificial Sequence: Synthetic peptide
QQYNNRPLT

SEQ ID NO: 737 - DNA, 372 bp, synthetic construct
  misc_feature 1..372: note = Description of Artificial Sequence: Synthetic polynucleotide
  source 1..372: mol_type = other DNA
gaagtgcagctggtggagtctgggggaggcttggtacagcctggcaggtccctgagactctcctgtgcagcctctggattcacctttgatgattattccatgcactgggtccggcaagctccagggaagggcctggagtgggtctcaggtattagttggaatagtcgtagcatagactatgcggactctgtgaagggccgattcaccatctccagagacaacgccaagaactccctgtatctgcaaatgaacagtctgagagctgaggacacggccttgtattactgtgtaaaagataatagtggctatggccgctattactactacgggatggacgtctggggccaagggaccacggtctccgtctcctca

SEQ ID NO: 738 - protein, 124 aa, synthetic construct
  REGION 1..124: note = Description of Artificial Sequence: Synthetic polypeptide
EVQLVESGGGLVQPGRSLRLSCAASGFTFDDYSMHWVRQAPGKGLEWVSGISWNSRSIDYADSVKGRFTISRDNAKNSLYLQMNSLRAEDTALYYCVKDNSGYGRYYYYGMDVWGQGTTVSVSS

SEQ ID NO: 739 - DNA, 24 bp, synthetic construct
  misc_feature 1..24: note = Description of Artificial Sequence: Synthetic oligonucleotide
  source 1..24: mol_type = other DNA
ggattcacctttgatgattattcc

SEQ ID NO: 740 - protein, 8 aa, synthetic construct
  REGION 1..8: note = Description of Artificial Sequence: Synthetic peptide
GFTFDDYS

SEQ ID NO: 741 - DNA, 24 bp, synthetic construct
  misc_feature 1..24: note = Description of Artificial Sequence: Synthetic oligonucleotide
  source 1..24: mol_type = other DNA
attagttggaatagtcgtagcata

SEQ ID NO: 742 - protein, 8 aa, synthetic construct
  REGION 1..8: note = Description of Artificial Sequence: Synthetic peptide
ISWNSRSI

SEQ ID NO: 743 - DNA, 51 bp, synthetic construct
  misc_feature 1..51: note = Description of Artificial Sequence: Synthetic oligonucleotide
  source 1..51: mol_type = other DNA
gtaaaagataatagtggctatggccgctattactactacgggatggacgtc

SEQ ID NO: 744 - protein, 17 aa, synthetic construct
  REGION 1..17: note = Description of Artificial Sequence: Synthetic peptide
VKDNSGYGRYYYYGMDV

SEQ ID NO: 745 - DNA, 321 bp, synthetic construct
  misc_feature 1..321: note = Description of Artificial Sequence: Synthetic polynucleotide
  source 1..321: mol_type = other DNA
aaaatagtgatgacgcagtctcccgccaccctgtctgtgtctccaggggaaagagccaccctctcctgcagggccagtcagagtgttagcggcaacttagcctggtaccagcaaaaacctggccaggctcccaggctcctcatctatggtgcatccaccagggccactagtatcccagccaggttcagtggcagtgggtctgggacagagttcactctcaccatcagcagcctgcagtctgaagattttgcagtttatttctgtcagcactattataactggcctctcactttcggcggagggaccaaggtggagatcaga

SEQ ID NO: 746 - protein, 107 aa, synthetic construct
  REGION 1..107: note = Description of Artificial Sequence: Synthetic polypeptide
KIVMTQSPATLSVSPGERATLSCRASQSVSGNLAWYQQKPGQAPRLLIYGASTRATSIPARFSGSGSGTEFTLTISSLQSEDFAVYFCQHYYNWPLTFGGGTKVEIR

SEQ ID NO: 747 - DNA, 18 bp, synthetic construct
  misc_feature 1..18: note = Description of Artificial Sequence: Synthetic oligonucleotide
  source 1..18: mol_type = other DNA
cagagtgttagcggcaac

SEQ ID NO: 748 - protein, 6 aa, synthetic construct
  REGION 1..6: note = Description of Artificial Sequence: Synthetic peptide
QSVSGN

SEQ ID NO: 749-750 - skipped (2 entries)

SEQ ID NO: 751 - DNA, 27 bp, synthetic construct
  misc_feature 1..27: note = Description of Artificial Sequence: Synthetic oligonucleotide
  source 1..27: mol_type = other DNA
cagcactattataactggcctctcact

SEQ ID NO: 752 - protein, 9 aa, synthetic construct
  REGION 1..9: note = Description of Artificial Sequence: Synthetic peptide
QHYYNWPLT

SEQ ID NO: 753 - DNA, 369 bp, synthetic construct; identical to SEQ ID NO: 401
  misc_feature 1..369: note = Description of Artificial Sequence: Synthetic polynucleotide
  source 1..369: mol_type = other DNA

SEQ ID NO: 754 - protein, 123 aa, synthetic construct; identical to SEQ ID NO: 402
  REGION 1..123: note = Description of Artificial Sequence: Synthetic polypeptide

SEQ ID NO: 755 - DNA, 24 bp, synthetic construct
  misc_feature 1..24: note = Description of Artificial Sequence: Synthetic oligonucleotide
  source 1..24: mol_type = other DNA
ggattcacctttgatgattttacc

SEQ ID NO: 756 - protein, 8 aa, synthetic construct
  REGION 1..8: note = Description of Artificial Sequence: Synthetic peptide
GFTFDDFT

SEQ ID NO: 757 - DNA, 24 bp, synthetic construct
  misc_feature 1..24: note = Description of Artificial Sequence: Synthetic oligonucleotide
  source 1..24: mol_type = other DNA
atcagttggaatagtggtagcata

SEQ ID NO: 758 - protein, 8 aa, synthetic construct
  REGION 1..8: note = Description of Artificial Sequence: Synthetic peptide
ISWNSGSI

SEQ ID NO: 759 - DNA, 48 bp, synthetic construct; identical to SEQ ID NO: 407
  misc_feature 1..48: note = Description of Artificial Sequence: Synthetic oligonucleotide
  source 1..48: mol_type = other DNA

SEQ ID NO: 760 - protein, 16 aa, synthetic construct
  REGION 1..16: note = Description of Artificial Sequence: Synthetic peptide
AKDNSGYGYYYYGMDV

SEQ ID NO: 761 - DNA, 339 bp, synthetic construct
  misc_feature 1..339: note = Description of Artificial Sequence: Synthetic polynucleotide
  source 1..339: mol_type = other DNA
gacatcgtgatgacccagtctccagactccctggctgtgtctctgggcgagagggccaccatcaactgcaagtccagccagagtgttttatacagctccaacaataagaactacttagcttggtaccagcagaaaccaggacagcctcctaagctgctcatttactgggcatctacccgggaatccggggtccctgaccgattcagtggcagcgggtctgggacagatttcactctcaccatcagcagcctgcaggctgaagatgtggcagtttattactgtcagcaatattatagtactccgtacacttttggccaggggaccaagctggagatcaaa

SEQ ID NO: 762 - protein, 113 aa, synthetic construct
  REGION 1..113: note = Description of Artificial Sequence: Synthetic polypeptide
DIVMTQSPDSLAVSLGERATINCKSSQSVLYSSNNKNYLAWYQQKPGQPPKLLIYWASTRESGVPDRFSGSGSGTDFTLTISSLQAEDVAVYYCQQYYSTPYTFGQGTKLEIK

SEQ ID NO: 763 - DNA, 36 bp, synthetic construct
  misc_feature 1..36: note = Description of Artificial Sequence: Synthetic oligonucleotide
  source 1..36: mol_type = other DNA
cagagtgttttatacagctccaacaataagaactac

SEQ ID NO: 764 - protein, 12 aa, synthetic construct
  REGION 1..12: note = Description of Artificial Sequence: Synthetic peptide
QSVLYSSNNKNY

SEQ ID NO: 765-766 - skipped (2 entries)

SEQ ID NO: 767 - DNA, 27 bp, synthetic construct
  misc_feature 1..27: note = Description of Artificial Sequence: Synthetic oligonucleotide
  source 1..27: mol_type = other DNA
cagcaatattatagtactccgtacact

SEQ ID NO: 768 - protein, 9 aa, synthetic construct
  REGION 1..9: note = Description of Artificial Sequence: Synthetic peptide
QQYYSTPYT

SEQ ID NO: 769 - DNA, 369 bp, synthetic construct
  misc_feature 1..369: note = Description of Artificial Sequence: Synthetic polynucleotide
  source 1..369: mol_type = other DNA
caggtcaccttgaaggagtctggtcctgcgctggtgaaacccacacagaccctcacactgacctgcaccttctctgggttctcactcagcactagtggaatgtgtgtgagctggatccgtcagcccccagggaaggccctggagtggcttgcacgcattgattgggatgatgataaatactacagcacatctctgaagaccaggctcaccatctccaaggacacctccaaaaaccaggtggtccttacaatgaccaacatggaccctgtggacacagccacgtattactgtgcacggatggatatagtgggagctagaggggggtggttcgacccctggggccagggaaccctggtcaccgtctcctca

SEQ ID NO: 770 - protein, 123 aa, synthetic construct
  REGION 1..123: note = Description of Artificial Sequence: Synthetic polypeptide
QVTLKESGPALVKPTQTLTLTCTFSGFSLSTSGMCVSWIRQPPGKALEWLARIDWDDDKYYSTSLKTRLTISKDTSKNQVVLTMTNMDPVDTATYYCARMDIVGARGGWFDPWGQGTLVTVSS

SEQ ID NO: 771 - DNA, 30 bp, synthetic construct
  misc_feature 1..30: note = Description of Artificial Sequence: Synthetic oligonucleotide
  source 1..30: mol_type = other DNA
gggttctcactcagcactagtggaatgtgt

SEQ ID NO: 772 - protein, 10 aa, synthetic construct
  REGION 1..10: note = Description of Artificial Sequence: Synthetic peptide
GFSLSTSGMC

SEQ ID NO: 773 - DNA, 21 bp, synthetic construct
  misc_feature 1..21: note = Description of Artificial Sequence: Synthetic oligonucleotide
  source 1..21: mol_type = other DNA
attgattgggatgatgataaa

SEQ ID NO: 774 - protein, 7 aa, synthetic construct
  REGION 1..7: note = Description of Artificial Sequence: Synthetic peptide
IDWDDDK

SEQ ID NO: 775 - DNA, 45 bp, synthetic construct
  misc_feature 1..45: note = Description of Artificial Sequence: Synthetic oligonucleotide
  source 1..45: mol_type = other DNA
gcacggatggatatagtgggagctagaggggggtggttcgacccc

SEQ ID NO: 776 - protein, 15 aa, synthetic construct
  REGION 1..15: note = Description of Artificial Sequence: Synthetic peptide
ARMDIVGARGGWFDP

SEQ ID NO: 777 - DNA, 321 bp, synthetic construct
  misc_feature 1..321: note = Description of Artificial Sequence: Synthetic polynucleotide
  source 1..321: mol_type = other DNA
gacatccagatgacccagtctccatcctcactgtctgcatctgtaggagacagagtcaccatcacttgtcgggcgagtcagggcattagcaattatttagcctggtttcagcagaaaccagggaaagcccctaagtccctgatctatgctgcatccagtttgcaaagtggggtcccatcaaagttcagcggcagtggatctgggacagatttcactctcaccatcagcagcctgcagcctgaagattttgcaacttattactgccaacagtataatagttacccgctcactttcggcggagggaccaaggtggagatcaaa

SEQ ID NO: 778 - protein, 107 aa, synthetic construct
  REGION 1..107: note = Description of Artificial Sequence: Synthetic polypeptide
DIQMTQSPSSLSASVGDRVTITCRASQGISNYLAWFQQKPGKAPKSLIYAASSLQSGVPSKFSGSGSGTDFTLTISSLQPEDFATYYCQQYNSYPLTFGGGTKVEIK

SEQ ID NO: 779 - DNA, 18 bp, synthetic construct
  misc_feature 1..18: note = Description of Artificial Sequence: Synthetic oligonucleotide
  source 1..18: mol_type = other DNA
cagggcattagcaattat

SEQ ID NO: 780 - protein, 6 aa, synthetic construct
  REGION 1..6: note = Description of Artificial Sequence: Synthetic peptide
QGISNY

SEQ ID NO: 781-782 - skipped (2 entries)

SEQ ID NO: 783 - DNA, 27 bp, synthetic construct
  misc_feature 1..27: note = Description of Artificial Sequence: Synthetic oligonucleotide
  source 1..27: mol_type = other DNA
caacagtataatagttacccgctcact

SEQ ID NO: 784 - protein, 9 aa, synthetic construct
  REGION 1..9: note = Description of Artificial Sequence: Synthetic peptide
QQYNSYPLT

SEQ ID NO: 785 - DNA, 404 bp, synthetic construct
  misc_feature 1..404: note = Description of Artificial Sequence: Synthetic polynucleotide
  source 1..404: mol_type = other DNA
caggtgcagttggtggagtctgggggaggcgtggtccagcctgggaggtccctgagactctcctgtgctgcgtctggattcaccttcagaagttatggcatgcactgggtccgccaggctccaggcaaggggctggagtgggtggcaatgatatattatgatggaaataataaaaagtatgcagactccgtgaggggccgattcaccatttccagagacaattccaagaacacgctgtatctgcaaatgaacagcctgagagtcgaggacacggctgtgtatttctgtgcgcgagggcctgggtacaactggctcgacccctggggccagggaaccctggtcaccgtctcctcagccaaaacaacagccccacccgtttatccactggcccctggaagcttggg

SEQ ID NO: 786 - protein, 134 aa, synthetic construct
  REGION 1..134: note = Description of Artificial Sequence: Synthetic polypeptide
QVQLVESGGGVVQPGRSLRLSCAASGFTFRSYGMHWVRQAPGKGLEWVAMIYYDGNNKKYADSVRGRFTISRDNSKNTLYLQMNSLRVEDTAVYFCARGPGYNWLDPWGQGTLVTVSSAKTTAPPVYPLAPGSL

SEQ ID NO: 787 - DNA, 24 bp, synthetic construct
  misc_feature 1..24: note = Description of Artificial Sequence: Synthetic oligonucleotide
  source 1..24: mol_type = other DNA
ggattcaccttcagaagttatggc

SEQ ID NO: 788 - protein, 8 aa, synthetic construct
  REGION 1..8: note = Description of Artificial Sequence: Synthetic peptide
GFTFRSYG

SEQ ID NO: 789 - DNA, 24 bp, synthetic construct
  misc_feature 1..24: note = Description of Artificial Sequence: Synthetic oligonucleotide
  source 1..24: mol_type = other DNA
atatattatgatggaaataataaa

SEQ ID NO: 790 - protein, 8 aa, synthetic construct
  REGION 1..8: note = Description of Artificial Sequence: Synthetic peptide
IYYDGNNK

SEQ ID NO: 791 - DNA, 33 bp, synthetic construct; identical to SEQ ID NO: 551
  misc_feature 1..33: note = Description of Artificial Sequence: Synthetic oligonucleotide
  source 1..33: mol_type = other DNA

SEQ ID NO: 792 - protein, 11 aa, synthetic construct
  REGION 1..11: note = Description of Artificial Sequence: Synthetic peptide
ARGPGYNWLDP

SEQ ID NO: 793 - DNA, 321 bp, synthetic construct
  misc_feature 1..321: note = Description of Artificial Sequence: Synthetic polynucleotide
  source 1..321: mol_type = other DNA
gaaatagtgatgacgcagtctccagccaccctgtctgtgtctccaggggaaagagccaccctctcctgcagggccagtcagagtgttagcaggaacttggcctggtaccagcagaaacctggccaggctcccaggctcctcatctatggtgcatccaccagggccactgatatcccagccaggttcagtggcagtgggtctgggacagagttcattctcaacatcagcagcctgcagtctgaagattttgcactttattactgtcaacaatatagtaactggcctctcactttcggcggagggaccgaggtggagatcaaa

SEQ ID NO: 794 - protein, 107 aa, synthetic construct
  REGION 1..107: note = Description of Artificial Sequence: Synthetic polypeptide
EIVMTQSPATLSVSPGERATLSCRASQSVSRNLAWYQQKPGQAPRLLIYGASTRATDIPARFSGSGSGTEFILNISSLQSEDFALYYCQQYSNWPLTFGGGTEVEIK

SEQ ID NO: 795 - DNA, 18 bp, synthetic construct
  misc_feature 1..18: note = Description of Artificial Sequence: Synthetic oligonucleotide
  source 1..18: mol_type = other DNA
cagagtgttagcaggaac

SEQ ID NO: 796 - protein, 6 aa, synthetic construct
  REGION 1..6: note = Description of Artificial Sequence: Synthetic peptide
QSVSRN

SEQ ID NO: 797-798 - skipped (2 entries)

SEQ ID NO: 799 - DNA, 27 bp, synthetic construct
  misc_feature 1..27: note = Description of Artificial Sequence: Synthetic oligonucleotide
  source 1..27: mol_type = other DNA
caacaatatagtaactggcctctcact

SEQ ID NO: 800 - protein, 9 aa, synthetic construct
  REGION 1..9: note = Description of Artificial Sequence: Synthetic peptide
QQYSNWPLT

SEQ ID NO: 801 - DNA, 354 bp, synthetic construct; identical to SEQ ID NO: 689
  misc_feature 1..354: note = Description of Artificial Sequence: Synthetic polynucleotide
  source 1..354: mol_type = other DNA

SEQ ID NO: 802 - protein, 118 aa, synthetic construct; identical to SEQ ID NO: 610
  REGION 1..118: note = Description of Artificial Sequence: Synthetic polypeptide

SEQ ID NO: 803 - DNA, 24 bp, synthetic construct
  misc_feature 1..24: note = Description of Artificial Sequence: Synthetic oligonucleotide
  source 1..24: mol_type = other DNA
ggtttcaccttcagaagttttggc

SEQ ID NO: 804 - protein, 8 aa, synthetic construct
  REGION 1..8: note = Description of Artificial Sequence: Synthetic peptide
GFTFRSFG

SEQ ID NO: 805 - DNA, 24 bp, synthetic construct
  misc_feature 1..24: note = Description of Artificial Sequence: Synthetic oligonucleotide
  source 1..24: mol_type = other DNA
atatattttgatggaaaaaataaa

SEQ ID NO: 806 - protein, 8 aa, synthetic construct
  REGION 1..8: note = Description of Artificial Sequence: Synthetic peptide
IYFDGKNK

SEQ ID NO: 807 - DNA, 33 bp, synthetic construct; identical to SEQ ID NO: 551
  misc_feature 1..33: note = Description of Artificial Sequence: Synthetic oligonucleotide
  source 1..33: mol_type = other DNA

SEQ ID NO: 808 - protein, 11 aa, synthetic construct
  REGION 1..11: note = Description of Artificial Sequence: Synthetic peptide
ARGPGYNWLDP

SEQ ID NO: 809 - DNA, 321 bp, synthetic construct
  misc_feature 1..321: note = Description of Artificial Sequence: Synthetic polynucleotide
  source 1..321: mol_type = other DNA
gaaatagtgatgacgcagtctccagccaccctgtctgtgtctccaggggaaagagtcatcctctcctgtagggccagtcagagtattagcaggaacttggcctggtaccagcagaaacctggccaggctcccaggctcctcatctatggtgcaaccaccagggccactggtgtcccagccaggttcagtggcagtgggtctgggacagagttcactctcaccatcagcagcctacagtctgaagattttgcagttttttactgtcagcagtataataataggcctctcactttcggcggagggaccgaggtggagatcaaa

SEQ ID NO: 810 - protein, 107 aa, synthetic construct; identical to SEQ ID NO: 698
  REGION 1..107: note = Description of Artificial Sequence: Synthetic polypeptide

SEQ ID NO: 811 - DNA, 18 bp, synthetic construct
  misc_feature 1..18: note = Description of Artificial Sequence: Synthetic oligonucleotide
  source 1..18: mol_type = other DNA
cagagtattagcaggaac

SEQ ID NO: 812 - protein, 6 aa, synthetic construct
  REGION 1..6: note = Description of Artificial Sequence: Synthetic peptide
QSISRN

SEQ ID NO: 813-814 - skipped (2 entries)

SEQ ID NO: 815 - DNA, 27 bp, synthetic construct
  misc_feature 1..27: note = Description of Artificial Sequence: Synthetic oligonucleotide
  source 1..27: mol_type = other DNA
cagcagtataataataggcctctcact

SEQ ID NO: 816 - protein, 9 aa, synthetic construct
  REGION 1..9: note = Description of Artificial Sequence: Synthetic peptide
QQYNNRPLT

SEQ ID NO: 817 - DNA, 354 bp, synthetic construct; identical to SEQ ID NO: 689
  misc_feature 1..354: note = Description of Artificial Sequence: Synthetic polynucleotide
  source 1..354: mol_type = other DNA

SEQ ID NO: 818 - protein, 118 aa, synthetic construct; identical to SEQ ID NO: 610
  REGION 1..118: note = Description of Artificial Sequence: Synthetic polypeptide

SEQ ID NO: 819 - DNA, 24 bp, synthetic construct
  misc_feature 1..24: note = Description of Artificial Sequence: Synthetic oligonucleotide
  source 1..24: mol_type = other DNA
ggtttcaccttcagaagttttggc

SEQ ID NO: 820 - protein, 8 aa, synthetic construct
  REGION 1..8: note = Description of Artificial Sequence: Synthetic peptide
GFTFRSFG

SEQ ID NO: 821 - DNA, 24 bp, synthetic construct
  misc_feature 1..24: note = Description of Artificial Sequence: Synthetic oligonucleotide
  source 1..24: mol_type = other DNA
atatattttgatggaaaaaataaa

SEQ ID NO: 822 - protein, 8 aa, synthetic construct
  REGION 1..8: note = Description of Artificial Sequence: Synthetic peptide
IYFDGKNK

SEQ ID NO: 823 - DNA, 33 bp, synthetic construct; identical to SEQ ID NO: 551
  misc_feature 1..33: note = Description of Artificial Sequence: Synthetic oligonucleotide
  source 1..33: mol_type = other DNA

SEQ ID NO: 824 - protein, 11 aa, synthetic construct
  REGION 1..11: note = Description of Artificial Sequence: Synthetic peptide
ARGPGYNWLDP

SEQ ID NO: 825 - DNA, 321 bp, synthetic construct; identical to SEQ ID NO: 809
  misc_feature 1..321: note = Description of Artificial Sequence: Synthetic polynucleotide
  source 1..321: mol_type = other DNA

SEQ ID NO: 826 - protein, 107 aa, synthetic construct; identical to SEQ ID NO: 698
  REGION 1..107: note = Description of Artificial Sequence: Synthetic polypeptide

SEQ ID NO: 827 - DNA, 18 bp, synthetic construct
  misc_feature 1..18: note = Description of Artificial Sequence: Synthetic oligonucleotide
  source 1..18: mol_type = other DNA
cagagtattagcaggaac

SEQ ID NO: 828 - protein, 6 aa, synthetic construct
  REGION 1..6: note = Description of Artificial Sequence: Synthetic peptide
QSISRN

SEQ ID NO: 829-830 - skipped (2 entries)

SEQ ID NO: 831 - DNA, 27 bp, synthetic construct
  misc_feature 1..27: note = Description of Artificial Sequence: Synthetic oligonucleotide
  source 1..27: mol_type = other DNA
cagcagtataataataggcctctcact

SEQ ID NO: 832 - protein, 9 aa, synthetic construct
  REGION 1..9: note = Description of Artificial Sequence: Synthetic peptide
QQYNNRPLT

SEQ ID NO: 833 - DNA, 351 bp, synthetic construct
  misc_feature 1..351: note = Description of Artificial Sequence: Synthetic polynucleotide
  source 1..351: mol_type = other DNA
caggtgcacctggaagagtctgggggaggcgtggtccagcctgggaggtccctgagactctcctgttcagcgtctggtttcaccttcagtagttatgccatgcactgggtccgccaggctccaggcaaggggctggagtgggtggcagttatatggtatgatggaactaataaatattatttagattccgtgaagggccgattcaccatctccagagacaattccaagaacacgctgtttctgcaaatgaacagcctgagagccgaagacacggctgtgtattactgtgcgagagatcggggaagtataataacccactggggccagggaaccctggtcaccgtctcctca

SEQ ID NO: 834 - protein, 117 aa, synthetic construct
  REGION 1..117: note = Description of Artificial Sequence: Synthetic polypeptide
QVHLEESGGGVVQPGRSLRLSCSASGFTFSSYAMHWVRQAPGKGLEWVAVIWYDGTNKYYLDSVKGRFTISRDNSKNTLFLQMNSLRAEDTAVYYCARDRGSIITHWGQGTLVTVSS

SEQ ID NO: 835 - DNA, 24 bp, synthetic construct
  misc_feature 1..24: note = Description of Artificial Sequence: Synthetic oligonucleotide
  source 1..24: mol_type = other DNA
ggtttcaccttcagtagttatgcc

SEQ ID NO: 836 - protein, 8 aa, synthetic construct
  REGION 1..8: note = Description of Artificial Sequence: Synthetic peptide
GFTFSSYA

SEQ ID NO: 837 - DNA, 24 bp, synthetic construct
  misc_feature 1..24: note = Description of Artificial Sequence: Synthetic oligonucleotide
  source 1..24: mol_type = other DNA
atatggtatgatggaactaataaa

SEQ ID NO: 838 - protein, 8 aa, synthetic construct
  REGION 1..8: note = Description of Artificial Sequence: Synthetic peptide
IWYDGTNK

SEQ ID NO: 839 - DNA, 30 bp, synthetic construct
  misc_feature 1..30: note = Description of Artificial Sequence: Synthetic oligonucleotide
  source 1..30: mol_type = other DNA
gcgagagatcggggaagtataataacccac

SEQ ID NO: 840 - protein, 10 aa, synthetic construct
  REGION 1..10: note = Description of Artificial Sequence: Synthetic peptide
ARDRGSIITH

SEQ ID NO: 841 - DNA, 324 bp, synthetic construct
  misc_feature 1..324: note = Description of Artificial Sequence: Synthetic polynucleotide
  source 1..324: mol_type = other DNA
gacatccagatgacccagtctccatcctccctgtctgcatctataggagacagagtcaccatcacttgccgggcaagtcagaacattagcagctatttaaattggtatcagcagaaaccagggaaagcccctaagctcctgatctatgctgcatccagtttgcaaagtggggtcccatcaaggttcagtggcagtggatctgggacagatttcactctcaccatcagcagtctgcaacctgaagattttgcaacttactactgtcaacagacttacagtacccctccgatcaccttcggccaagggacacgactggagattaaa

SEQ ID NO: 842 - protein, 108 aa, synthetic construct
  REGION 1..108: note = Description of Artificial Sequence: Synthetic polypeptide
DIQMTQSPSSLSASIGDRVTITCRASQNISSYLNWYQQKPGKAPKLLIYAASSLQSGVPSRFSGSGSGTDFTLTISSLQPEDFATYYCQQTYSTPPITFGQGTRLEIK

SEQ ID NO: 843 - DNA, 18 bp, synthetic construct
  misc_feature 1..18: note = Description of Artificial Sequence: Synthetic oligonucleotide
  source 1..18: mol_type = other DNA
cagaacattagcagctat

SEQ ID NO: 844 - protein, 6 aa, synthetic construct
  REGION 1..6: note = Description of Artificial Sequence: Synthetic peptide
QNISSY

SEQ ID NO: 845-846 - skipped (2 entries)

SEQ ID NO: 847 - DNA, 30 bp, synthetic construct
  misc_feature 1..30: note = Description of Artificial Sequence: Synthetic oligonucleotide
  source 1..30: mol_type = other DNA
caacagacttacagtacccctccgatcacc

SEQ ID NO: 848 - protein, 10 aa, synthetic construct
  REGION 1..10: note = Description of Artificial Sequence: Synthetic peptide
QQTYSTPPIT

SEQ ID NO: 849 - DNA, 372 bp, synthetic construct
  misc_feature 1..372: note = Description of Artificial Sequence: Synthetic polynucleotide
  source 1..372: mol_type = other DNA
gaagtacagctggtggagtctgggggaggcttggtacggcctggcaggtccctgagactctcctgtgcagcctctggattcacctttgatgattataccatgcactgggtccgccaagctccagggaagggcctggagtgggtctcagatattagttggaatagtgggaccataggctatgcggactctgtgaagggccgattcaccatctccagagacaacgccaagaactccctgtatctgcaaatgaacagtctgagacctgaggacacggccttgtattactgtgcaaaagatatgagtggctacgcccactactactactacggtatggacgtctggggccaagggaccacggtcaccgtctcctca

SEQ ID NO: 850 - protein, 124 aa, synthetic construct
  REGION 1..124: note = Description of Artificial Sequence: Synthetic polypeptide
EVQLVESGGGLVRPGRSLRLSCAASGFTFDDYTMHWVRQAPGKGLEWVSDISWNSGTIGYADSVKGRFTISRDNAKNSLYLQMNSLRPEDTALYYCAKDMSGYAHYYYYGMDVWGQGTTVTVSS

SEQ ID NO: 851 - DNA, 24 bp, synthetic construct
  misc_feature 1..24: note = Description of Artificial Sequence: Synthetic oligonucleotide
  source 1..24: mol_type = other DNA
ggattcacctttgatgattatacc

SEQ ID NO: 852 - protein, 8 aa, synthetic construct
  REGION 1..8: note = Description of Artificial Sequence: Synthetic peptide
GFTFDDYT

SEQ ID NO: 853 - DNA, 24 bp, synthetic construct
  misc_feature 1..24: note = Description of Artificial Sequence: Synthetic oligonucleotide
  source 1..24: mol_type = other DNA
attagttggaatagtgggaccata

SEQ ID NO: 854 - protein, 8 aa, synthetic construct
  REGION 1..8: note = Description of Artificial Sequence: Synthetic peptide
ISWNSGTI

SEQ ID NO: 855 - DNA, 51 bp, synthetic construct
  misc_feature 1..51: note = Description of Artificial Sequence: Synthetic oligonucleotide
  source 1..51: mol_type = other DNA
gcaaaagatatgagtggctacgcccactactactactacggtatggacgtc

SEQ ID NO: 856 - protein, 17 aa, synthetic construct
  REGION 1..17: note = Description of Artificial Sequence: Synthetic peptide
AKDMSGYAHYYYYGMDV

SEQ ID NO: 857 - DNA, 324 bp, synthetic construct
  misc_feature 1..324: note = Description of Artificial Sequence: Synthetic polynucleotide
  source 1..324: mol_type = other DNA
gacatccagatgacccagtctccatcctccctgtctgcatctgtaggagacagagtcaccatcacttgccgggcaagtcagagcattagcagctatttaaattggtatcagcagaaaccagggaaagcccctaagctcctgatctatgctgcatccagtttgcaaagtggggtcccatcaaggttcagtggcagtggatctgggacagatttcactctcaccatcagcagtctgcaacctgaagattttgcaacttactactgtcaacagagttacagtacccctccgatcaccttcggccaagggacacgactggagattaaa

SEQ ID NO: 858 - protein, 108 aa, synthetic construct; identical to SEQ ID NO: 58
  REGION 1..108: note = Description of Artificial Sequence: Synthetic polypeptide

SEQ ID NO: 859 - DNA, 18 bp, synthetic construct
  misc_feature 1..18: note = Description of Artificial Sequence: Synthetic oligonucleotide
  source 1..18: mol_type = other DNA
cagagcattagcagctat

SEQ ID NO: 860 - protein, 6 aa, synthetic construct
  REGION 1..6: note = Description of Artificial Sequence: Synthetic peptide
QSISSY

SEQ ID NO: 861-862 - skipped (2 entries)

SEQ ID NO: 863 - DNA, 30 bp, synthetic construct; identical to SEQ ID NO: 15
  misc_feature 1..30: note = Description of Artificial Sequence: Synthetic oligonucleotide
  source 1..30: mol_type = other DNA

SEQ ID NO: 864 - protein, 10 aa, synthetic construct
  REGION 1..10: note = Description of Artificial Sequence: Synthetic peptide
QQSYSTPPIT

SEQ ID NO: 865 - DNA, 372 bp, synthetic construct
  misc_feature 1..372: note = Description of Artificial Sequence: Synthetic polynucleotide
  source 1..372: mol_type = other DNA
gaagtgcagctggtggagtctgggggaggcttggtacagcctggcaggtccctgagactctcctgtgcagcctctggattcacctttgatgattataccatgcactgggtccggcaagctccagggaagggcctggagtgggtctccgatattagttggaatagtggtagcataggctatgcggactctgtgaagggccgattcaccgtctccagagacaacgccaagaactccctgtatctgcaaatgaacagtctgagaggtgaggacacggccctgtattactgtgcaaaagatatgagtggctacgcccactacggctactacggtatggacgtctggggccaagggaccacggtcaccgtctcctca

SEQ ID NO: 866 - protein, 124 aa, synthetic construct
  REGION 1..124: note = Description of Artificial Sequence: Synthetic polypeptide
EVQLVESGGGLVQPGRSLRLSCAASGFTFDDYTMHWVRQAPGKGLEWVSDISWNSGSIGYADSVKGRFTVSRDNAKNSLYLQMNSLRGEDTALYYCAKDMSGYAHYGYYGMDVWGQGTTVTVSS

SEQ ID NO: 867 - DNA, 24 bp, synthetic construct
  misc_feature 1..24: note = Description of Artificial Sequence: Synthetic oligonucleotide
  source 1..24: mol_type = other DNA
ggattcacctttgatgattatacc

SEQ ID NO: 868 - protein, 8 aa, synthetic construct
  REGION 1..8: note = Description of Artificial Sequence: Synthetic peptide
GFTFDDYT

SEQ ID NO: 869 - DNA, 24 bp, synthetic construct
  misc_feature 1..24: note = Description of Artificial Sequence: Synthetic oligonucleotide
  source 1..24: mol_type = other DNA
attagttggaatagtggtagcata

SEQ ID NO: 870 - protein, 8 aa, synthetic construct
  REGION 1..8: note = Description of Artificial Sequence: Synthetic peptide
ISWNSGSI

SEQ ID NO: 871 - DNA, 51 bp, synthetic construct
  misc_feature 1..51: note = Description of Artificial Sequence: Synthetic oligonucleotide
  source 1..51: mol_type = other DNA
gcaaaagatatgagtggctacgcccactacggctactacggtatggacgtc

SEQ ID NO: 872 - protein, 17 aa, synthetic construct
  REGION 1..17: note = Description of Artificial Sequence: Synthetic peptide
AKDMSGYAHYGYYGMDV

SEQ ID NO: 873 - DNA, 324 bp, synthetic construct
  misc_feature 1..324: note = Description of Artificial Sequence: Synthetic polynucleotide
  source 1..324: mol_type = other DNA
gacatccagatgacccagtctccatcctccctgtctgcatctgtaggagacagagtcaccatcacttgccgggcaagtcagagcattaggaactatttaaattggtatcagcagaaaccagggaaagtccctaagctcctgatctatgctgcatccagtttgcaaagtggggtcccatcaaggttcagtggcagtggatctgggacagatttcactctcaccatcagcagtctgcaacctgaagattttgcaacttactactgtcaacagagttacagtaaccctccgatcaccttcggccaagggacacgactggagattaaa

SEQ ID NO: 874 - protein, 108 aa, synthetic construct
  REGION 1..108: note = Description of Artificial Sequence: Synthetic polypeptide
DIQMTQSPSSLSASVGDRVTITCRASQSIRNYLNWYQQKPGKVPKLLIYAASSLQSGVPSRFSGSGSGTDFTLTISSLQPEDFATYYCQQSYSNPPITFGQGTRLEIK

SEQ ID NO: 875 - DNA, 18 bp, synthetic construct
  misc_feature 1..18: note = Description of Artificial Sequence: Synthetic oligonucleotide
  source 1..18: mol_type = other DNA
cagagcattaggaactat

SEQ ID NO: 876 - protein, 6 aa, synthetic construct
  REGION 1..6: note = Description of Artificial Sequence: Synthetic peptide
QSIRNY

SEQ ID NO: 877-878 - skipped (2 entries)

SEQ ID NO: 879 - DNA, 30 bp, synthetic construct
  misc_feature 1..30: note = Description of Artificial Sequence: Synthetic oligonucleotide
  source 1..30: mol_type = other DNA
caacagagttacagtaaccctccgatcacc

SEQ ID NO: 880 - protein, 10 aa, synthetic construct
  REGION 1..10: note = Description of Artificial Sequence: Synthetic peptide
QQSYSNPPIT

SEQ ID NO: 881 - DNA, 369 bp, synthetic construct
  misc_feature 1..369: note = Description of Artificial Sequence: Synthetic polynucleotide
  source 1..369: mol_type = other DNA
gaagcgcagctggtggaatctgggggaggcttggtacagcctggcaggtccctgagactctcctgtacaacctctggattcacctttgatgattataccatgcactgggtccggcaagctccagggaagggcctggagtggatctctgatattagttggaatggtggaaccaaaggctatgcggactctgtgaagggccgattcaccatctccagagacaacgccaaaaactccctgtatctgcaaatggacagtctgagaggtgaggacacggccttatattactgtgtaaaagataaaagtggctacgggcacttctacttcggtttggacgtctggggccaagggaccacggtcaccgtctcctca

SEQ ID NO: 882 - protein, 123 aa, synthetic construct
  REGION 1..123: note = Description of Artificial Sequence: Synthetic polypeptide
EAQLVESGGGLVQPGRSLRLSCTTSGFTFDDYTMHWVRQAPGKGLEWISDISWNGGTKGYADSVKGRFTISRDNAKNSLYLQMDSLRGEDTALYYCVKDKSGYGHFYFGLDVWGQGTTVTVSS

SEQ ID NO: 883 - DNA, 24 bp, synthetic construct
  misc_feature 1..24: note = Description of Artificial Sequence: Synthetic oligonucleotide
  source 1..24: mol_type = other DNA
ggattcacctttgatgattatacc

SEQ ID NO: 884 - protein, 8 aa, synthetic construct
  REGION 1..8: note = Description of Artificial Sequence: Synthetic peptide
GFTFDDYT

SEQ ID NO: 885 - DNA, 24 bp, synthetic construct
  misc_feature 1..24: note = Description of Artificial Sequence: Synthetic oligonucleotide
  source 1..24: mol_type = other DNA
attagttggaatggtggaaccaaa

SEQ ID NO: 886 - protein, 8 aa, synthetic construct
  REGION 1..8: note = Description of Artificial Sequence: Synthetic peptide
ISWNGGTK

SEQ ID NO: 887 - DNA, 48 bp, synthetic construct
  misc_feature 1..48: note = Description of Artificial Sequence: Synthetic oligonucleotide
  source 1..48: mol_type = other DNA
gtaaaagataaaagtggctacgggcacttctacttcggtttggacgtc

SEQ ID NO: 888 - protein, 16 aa, synthetic construct
  REGION 1..16: note = Description of Artificial Sequence: Synthetic peptide
VKDKSGYGHFYFGLDV

SEQ ID NO: 889 - DNA, 324 bp, synthetic construct
  misc_feature 1..324: note = Description of Artificial Sequence: Synthetic polynucleotide
  source 1..324: mol_type = other DNA
gacatccagatgacccagtctccatcctccctgactgcgtctgtaggagacagagtcaccttcacttgccgggcaagtcagagcattagcaggcatttaagttggtatcagcagaaaccagggaaagcccctaagctcctgatctatgctgcatccagtttggaaagtggggtcccttcaaggttcagtggcagtggatctgggacagatttcactctcaccatcagcagtctgcaccctgaagattttgcaacttactactgtcaacagagctacagtaaccctccgatcaccttcggccaagggacacgactggagattaaa

SEQ ID NO: 890 - protein, 108 aa, synthetic construct
  REGION 1..108: note = Description of Artificial Sequence: Synthetic polypeptide
DIQMTQSPSSLTASVGDRVTFTCRASQSISRHLSWYQQKPGKAPKLLIYAASSLESGVPSRFSGSGSGTDFTLTISSLHPEDFATYYCQQSYSNPPITFGQGTRLEIK

SEQ ID NO: 891 - DNA, 18 bp, synthetic construct
  misc_feature 1..18: note = Description of Artificial Sequence: Synthetic oligonucleotide
  source 1..18: mol_type = other DNA
cagagcattagcaggcat

SEQ ID NO: 892 - protein, 6 aa, synthetic construct
  REGION 1..6: note = Description of Artificial Sequence: Synthetic peptide
QSISRH

SEQ ID NO: 893-894 - skipped (2 entries)

SEQ ID NO: 895 - DNA, 30 bp, synthetic construct
  misc_feature 1..30: note = Description of Artificial Sequence: Synthetic oligonucleotide
  source 1..30: mol_type = other DNA
caacagagctacagtaaccctccgatcacc

SEQ ID NO: 896 - protein, 10 aa, synthetic construct
  REGION 1..10: note = Description of Artificial Sequence: Synthetic peptide
QQSYSNPPIT

SEQ ID NO: 897 - DNA, 369 bp, synthetic construct
  misc_feature 1..369: note = Description of Artificial Sequence: Synthetic polynucleotide
  source 1..369: mol_type = other DNA
gaagtgcagttggtggagtctgggggaggcttggtacagcctggcaggtccctgagactctcctgtgcagcctctggattcaagtttgctgattatgccatgcactgggtccggcaagctccagggaagggcctggagtgggtctcagagattagttggaatagtggtagcataggttatgtggactctgtgaagggccgattcaccatctccagagacaacgccaagaactccctgtatctgcaaatgaacagtctgagagctgaggacacggccttgtattactgtgtaaaagataaaagtggctacgggcactactatatcggtatggacgtctggggccaagggaccacggtcatcgtctcctcc

SEQ ID NO: 898 - protein, 123 aa, synthetic construct
  REGION 1..123: note = Description of Artificial Sequence: Synthetic polypeptide
EVQLVESGGGLVQPGRSLRLSCAASGFKFADYAMHWVRQAPGKGLEWVSEISWNSGSIGYVDSVKGRFTISRDNAKNSLYLQMNSLRAEDTALYYCVKDKSGYGHYYIGMDVWGQGTTVIVSS

SEQ ID NO: 899 - DNA, 24 bp, synthetic construct
  misc_feature 1..24: note = Description of Artificial Sequence: Synthetic oligonucleotide
  source 1..24: mol_type = other DNA
ggattcaagtttgctgattatgcc

SEQ ID NO: 900 - protein, 8 aa, synthetic construct
  REGION 1..8: note = Description of Artificial Sequence: Synthetic peptide
GFKFADYA

SEQ ID NO: 901 - DNA, 24 bp, synthetic construct
  misc_feature 1..24: note = Description of Artificial Sequence: Synthetic oligonucleotide
  source 1..24: mol_type = other DNA
attagttggaatagtggtagcata

SEQ ID NO: 902 - protein, 8 aa, synthetic construct
  REGION 1..8: note = Description of Artificial Sequence: Synthetic peptide
ISWNSGSI

SEQ ID NO: 903 - DNA, 48 bp, synthetic construct
  misc_feature 1..48: note = Description of Artificial Sequence: Synthetic oligonucleotide
  source 1..48: mol_type = other DNA
gtaaaagataaaagtggctacgggcactactatatcggtatggacgtc

SEQ ID NO: 904 - protein, 16 aa, synthetic construct
  REGION 1..16: note = Description of Artificial Sequence: Synthetic peptide
VKDKSGYGHYYIGMDV

SEQ ID NO: 905 - DNA, 324 bp, synthetic construct
  misc_feature 1..324: note = Description of Artificial Sequence: Synthetic polynucleotide
  source 1..324: mol_type = other DNA
gacatccagatgacccagtctccatcctccctgtctgcatctgtaggagacagagtcaccatcacttgccgggcaagtcagagtattagcagctatttaaattggtatcagcagaaaccagggaaagcccctaagctcctgatctatgctgcatccagtttgcaaagtggggtcccatcaaggttcagtggcagtggatctgggacagatttcactctcaccatcagcagtctgcaacctgaagattttgcaacttactactgtcaacagagttacagtacccctccgatcaccttcggccaagggacacgactggagattaaa

SEQ ID NO: 906 - protein, 108 aa, synthetic construct; identical to SEQ ID NO: 58
  REGION 1..108: note = Description of Artificial Sequence: Synthetic polypeptide

SEQ ID NO: 907 - DNA, 18 bp, synthetic construct
  misc_feature 1..18: note = Description of Artificial Sequence: Synthetic oligonucleotide
  source 1..18: mol_type = other DNA
cagagtattagcagctat

SEQ ID NO: 908 - protein, 6 aa, synthetic construct
  REGION 1..6: note = Description of Artificial Sequence: Synthetic peptide
QSISSY

SEQ ID NO: 909-910 - skipped (2 entries)

SEQ ID NO: 911 - DNA, 30 bp, synthetic construct; identical to SEQ ID NO: 15
  misc_feature 1..30: note = Description of Artificial Sequence: Synthetic oligonucleotide
  source 1..30: mol_type = other DNA

SEQ ID NO: 912 - protein, 10 aa, synthetic construct
  REGION 1..10: note = Description of Artificial Sequence: Synthetic peptide
QQSYSTPPIT

SEQ ID NO: 913 - DNA, 372 bp, synthetic construct
  misc_feature 1..372: note = Description of Artificial Sequence: Synthetic polynucleotide
  source 1..372: mol_type = other DNA
gaagtgcacctggtggagtctgggggaggcttggtacagcctggcaggtccctgagactctcctgtgcagcctctggattcacctttgatgattataccatgcactgggtccggcaagctccagggaagggcctggagtgggtctccgatattagttggaatagtggtagcataggctatgcggactctgtgaagggccgattcaccgtctccagagacaacgccaagaactccctgtatctgcaaatgaacagtctgagaggtgaggacacggccttgtattactgtgcaaaagatatgagtggctacggccactacggcaagtacggtatggacgtctggggccaagggaccacggtcaccgtctcctca

SEQ ID NO: 914 - protein, 124 aa, synthetic construct
  REGION 1..124: note = Description of Artificial Sequence: Synthetic polypeptide
EVHLVESGGGLVQPGRSLRLSCAASGFTFDDYTMHWVRQAPGKGLEWVSDISWNSGSIGYADSVKGRFTVSRDNAKNSLYLQMNSLRGEDTALYYCAKDMSGYGHYGKYGMDVWGQGTTVTVSS

SEQ ID NO: 915 - DNA, 24 bp, synthetic construct
  misc_feature 1..24: note = Description of Artificial Sequence: Synthetic oligonucleotide
  source 1..24: mol_type = other DNA
ggattcacctttgatgattatacc

SEQ ID NO: 916 - protein, 8 aa, synthetic construct
  REGION 1..8: note = Description of Artificial Sequence: Synthetic peptide
GFTFDDYT

SEQ ID NO: 917 - DNA, 24 bp, synthetic construct
  misc_feature 1..24: note = Description of Artificial Sequence: Synthetic oligonucleotide
  source 1..24: mol_type = other DNA
attagttggaatagtggtagcata

SEQ ID NO: 918 - protein, 8 aa, synthetic construct
  REGION 1..8: note = Description of Artificial Sequence: Synthetic peptide
ISWNSGSI

SEQ ID NO: 919 - DNA, 51 bp, synthetic construct
  misc_feature 1..51: note = Description of Artificial Sequence: Synthetic oligonucleotide
  source 1..51: mol_type = other DNA
gcaaaagatatgagtggctacggccactacggcaagtacggtatggacgtc

SEQ ID NO: 920 - protein, 17 aa, synthetic construct
  REGION 1..17: note = Description of Artificial Sequence: Synthetic peptide
AKDMSGYGHYGKYGMDV

SEQ ID NO: 921 - DNA, 324 bp, synthetic construct
  misc_feature 1..324: note = Description of Artificial Sequence: Synthetic polynucleotide
  source 1..324: mol_type = other DNA
gacatccagatgacccagtctccatcctccctgtctgcatctgtaggagacagagtcaccatcacttgccgggcaagtcagagcattaggagctatttaaattggtatcagcagaaaccagggaaagtccctaagctcctgatctatgctgcatccagtttgcaaagtggggtcccatcaaggttcagtggcagtggatctgggacagatttcactctcaccatcaacagtctgcaacctgacgattttgcaacttactactgtcaacagacttacagtaaccctccgatcaccttcggccaagggacacgactggagattaaa

SEQ ID NO: 922 - protein, 108 aa, synthetic construct
  REGION 1..108: note = Description of Artificial Sequence: Synthetic polypeptide
DIQMTQSPSSLSASVGDRVTITCRASQSIRSYLNWYQQKPGKVPKLLIYAASSLQSGVPSRFSGSGSGTDFTLTINSLQPDDFATYYCQQTYSNPPITFGQGTRLEIK

SEQ ID NO: 923 - DNA, 18 bp, synthetic construct
  misc_feature 1..18: note = Description of Artificial Sequence: Synthetic oligonucleotide
  source 1..18: mol_type = other DNA
cagagcattaggagctat

SEQ ID NO: 924 - protein, 6 aa, synthetic construct
  REGION 1..6: note = Description of Artificial Sequence: Synthetic peptide
QSIRSY

SEQ ID NO: 925-926 - skipped (2 entries)

SEQ ID NO: 927 - DNA, 30 bp, synthetic construct
  misc_feature 1..30: note = Description of Artificial Sequence: Synthetic oligonucleotide
  source 1..30: mol_type = other DNA
caacagacttacagtaaccctccgatcacc

SEQ ID NO: 928 - protein, 10 aa, synthetic construct
  REGION 1..10: note = Description of Artificial Sequence: Synthetic peptide
QQTYSNPPIT

SEQ ID NO: 929 - DNA, 372 bp, synthetic construct
  misc_feature 1..372: note = Description of Artificial Sequence: Synthetic polynucleotide
  source 1..372: mol_type = other DNA
gaggtgcagctggtggagtctgggggagacttggtacagcctggcaggtccctgagactctcctgtgcagcctctggattcacctttgatgattataccatgcactgggtccggcaagctccagggaagggcctggagtgggtctcaattattagttggaatggtaataccattgactatgcggactctgtgaagggccgattcaccatctccagagacaacgccaagaactccctgtatcttcaaatgaacagtctgagagctgaggacacggccttgtattactgtgcaaaagataagagtggctacggacacttctactattacgttttggacgtctggggccaagggaccacggtcaccgtctcctca

SEQ ID NO: 930 - protein, 124 aa, synthetic construct
  REGION 1..124: note = Description of Artificial Sequence: Synthetic polypeptide
EVQLVESGGDLVQPGRSLRLSCAASGFTFDDYTMHWVRQAPGKGLEWVSIISWNGNTIDYADSVKGRFTISRDNAKNSLYLQMNSLRAEDTALYYCAKDKSGYGHFYYYVLDVWGQGTTVTVSS

SEQ ID NO: 931 - DNA, 24 bp, synthetic construct
  misc_feature 1..24: note = Description of Artificial Sequence: Synthetic oligonucleotide
  source 1..24: mol_type = other DNA
ggattcacctttgatgattatacc

SEQ ID NO: 932 - protein, 8 aa, synthetic construct
  REGION 1..8: note = Description of Artificial Sequence: Synthetic peptide
GFTFDDYT

SEQ ID NO: 933 - DNA, 24 bp, synthetic construct
  misc_feature 1..24: note = Description of Artificial Sequence: Synthetic oligonucleotide
  source 1..24: mol_type = other DNA
attagttggaatggtaataccatt

SEQ ID NO: 934 - protein, 8 aa, synthetic construct
  REGION 1..8: note = Description of Artificial Sequence: Synthetic peptide
ISWNGNTI

SEQ ID NO: 935 - DNA, 51 bp, synthetic construct
  misc_feature 1..51: note = Description of Artificial Sequence: Synthetic oligonucleotide
  source 1..51: mol_type = other DNA
gcaaaagataagagtggctacggacacttctactattacgttttggacgtc

SEQ ID NO: 936 - protein, 17 aa, synthetic construct
  REGION 1..17: note = Description of Artificial Sequence: Synthetic peptide
AKDKSGYGHFYYYVLDV

SEQ ID NO: 937 - DNA, 321 bp, synthetic construct
  misc_feature 1..321: note = Description of Artificial Sequence: Synthetic polynucleotide
  source 1..321: mol_type = other DNA
gacatccagatgacccagtctccatcctccctgtctgcatctgtaggagacagagtcaccatcacttgccgggcaagtcagagcattaacaactatttaaattggtatcagcagaaaccagggaaagcccctaaactcctgatctatgctgcttccagtttgcaaagtggggtcccgtcaaggttcagtggcagtggttctgggacagatttcactctcaccatcagcagtctgcaacctgaagattttgcaacttactactctcaacagagttacagtttcccgtggacgttcggccaagggaccaaggtggaaatcaaa

SEQ ID NO: 938 - protein, 107 aa, synthetic construct
  REGION 1..107: note = Description of Artificial Sequence: Synthetic polypeptide
DIQMTQSPSSLSASVGDRVTITCRASQSINNYLNWYQQKPGKAPKLLIYAASSLQSGVPSRFSGSGSGTDFTLTISSLQPEDFATYYSQQSYSFPWTFGQGTKVEIK

SEQ ID NO: 939 - DNA, 18 bp, synthetic construct
  misc_feature 1..18: note = Description of Artificial Sequence: Synthetic oligonucleotide
  source 1..18: mol_type = other DNA
cagagcattaacaactat

SEQ ID NO: 940 - protein, 6 aa, synthetic construct
  REGION 1..6: note = Description of Artificial Sequence: Synthetic peptide
QSINNY

SEQ ID NO: 941-942 - skipped (2 entries)

SEQ ID NO: 943 - DNA, 27 bp, synthetic construct
  misc_feature 1..27: note = Description of Artificial Sequence: Synthetic oligonucleotide
  source 1..27: mol_type = other DNA
caacagagttacagtttcccgtggacg

SEQ ID NO: 944 - protein, 9 aa, synthetic construct
  REGION 1..9: note = Description of Artificial Sequence: Synthetic peptide
QQSYSFPWT

SEQ ID NO: 945 - DNA, 363 bp, synthetic construct
  misc_feature 1..363: note = Description of Artificial Sequence: Synthetic polynucleotide
  source 1..363: mol_type = other DNA
caggtgcagctggtggagtcggggggaggcgtggtccagcctgggaggtccctgagaccctcctgtgcagcgtctggatttagtttcagggactatggcatgcactgggtccgccaggctccaggtaagggactagagtggatggcacacatatggtataatggaaagaataaatattatgcagactccgtgaagggccgattcaccatctccagagacaattccaagaacacgctatatctgcaaatgaacagcctgagacccgaggacacggctgtatattattgtgcgagagatggtgtatcagcacgtggtactccatttgactactggggccagggaaccctggtcaccgtctcctca

SEQ ID NO: 946 - protein, 121 aa, synthetic construct
  REGION 1..121: note = Description of Artificial Sequence: Synthetic polypeptide
QVQLVESGGGVVQPGRSLRPSCAASGFSFRDYGMHWVRQAPGKGLEWMAHIWYNGKNKYYADSVKGRFTISRDNSKNTLYLQMNSLRPEDTAVYYCARDGVSARGTPFDYWGQGTLVTVSS

SEQ ID NO: 947 - DNA, 24 bp, synthetic construct
  misc_feature 1..24: note = Description of Artificial Sequence: Synthetic oligonucleotide
  source 1..24: mol_type = other DNA
ggatttagtttcagggactatggc

SEQ ID NO: 948 - protein, 8 aa, synthetic construct
  REGION 1..8: note = Description of Artificial Sequence: Synthetic peptide
GFSFRDYG

SEQ ID NO: 949 - DNA, 24 bp, synthetic construct
  misc_feature 1..24: note = Description of Artificial Sequence: Synthetic oligonucleotide
  source 1..24: mol_type = other DNA
atatggtataatggaaagaataaa

SEQ ID NO: 950 - protein, 8 aa, synthetic construct
  REGION 1..8: note = Description of Artificial Sequence: Synthetic peptide
IWYNGKNK

SEQ ID NO: 951 - DNA, 42 bp, synthetic construct
  misc_feature 1..42: note = Description of Artificial Sequence: Synthetic oligonucleotide
  source 1..42: mol_type = other DNA
gcgagagatggtgtatcagcacgtggtactccatttgactac

SEQ ID NO: 952 - protein, 14 aa, synthetic construct
  REGION 1..14: note = Description of Artificial Sequence: Synthetic peptide
ARDGVSARGTPFDY

SEQ ID NO: 953 - DNA, 321 bp, synthetic construct
  misc_feature 1..321: note = Description of Artificial Sequence: Synthetic polynucleotide
  source 1..321: mol_type = other DNA
gaaacgacactcacgcagtctccagcattcatgtcagcggctccaggagacaaagtcagcatctcctgcattgccagccagtacattgatgatgatgtgaactggtaccaacagaaaccaggagaaactgctattttcattattcaagaagcttctactctcgttcctggaatctcacctcgattcagtggcagcgggtatggaacacattttaccctcacaattaataacatagattctgaggatgctgcattttacttctgtctccaacatgataatttcccgtacacttttggccaggggaccaagctggagatcaaa

SEQ ID NO: 954 - protein, 107 aa, synthetic construct
  REGION 1..107: note = Description of Artificial Sequence: Synthetic polypeptide
ETTLTQSPAFMSAAPGDKVSISCIASQYIDDDVNWYQQKPGETAIFIIQEASTLVPGISPRFSGSGYGTHFTLTINNIDSEDAAFYFCLQHDNFPYTFGQGTKLEIK

SEQ ID NO: 955 - DNA, 18 bp, synthetic construct
  misc_feature 1..18: note = Description of Artificial Sequence: Synthetic oligonucleotide
  source 1..18: mol_type = other DNA
cagtacattgatgatgat

SEQ ID NO: 956 - protein, 6 aa, synthetic construct
  REGION 1..6: note = Description of Artificial Sequence: Synthetic peptide
QYIDDD

SEQ ID NO: 957-958 - skipped (2 entries)

SEQ ID NO: 959 - DNA, 27 bp, synthetic construct
  misc_feature 1..27: note = Description of Artificial Sequence: Synthetic oligonucleotide
  source 1..27: mol_type = other DNA
ctccaacatgataatttcccgtacact

SEQ ID NO: 960 - protein, 9 aa, synthetic construct
  REGION 1..9: note = Description of Artificial Sequence: Synthetic peptide
LQHDNFPYT

SEQ ID NO: 961 - DNA, 384 bp, synthetic construct
  misc_feature 1..384: note = Description of Artificial Sequence: Synthetic polynucleotide
  source 1..384: mol_type = other DNA
caggtgcagctggtggagtctgggggaggcttggtacagcctggggggtccctgagactctcctgtgcagcctcttatttcacctttagcagttttgccatgaactgggtccgccaggctccagggcagggcctggagtgggtctcagctattagtggtagggtctcagctattagtggtagtggtggtatcacatactacgcagactccgtgaagggccggttcatcatctccagagacaattccaagaacacgctgtatctgcaaatgagcggcctgagagccgaggacacggccgtatattactgtgcgaaaggcccctatttgactacagtcaccccctttgactactggggccagggaaccctggtcaccgtctcctca

SEQ ID NO: 962 - protein, 128 aa, synthetic construct
  REGION 1..128: note = Description of Artificial Sequence: Synthetic polypeptide
QVQLVESGGGLVQPGGSLRLSCAASYFTFSSFAMNWVRQAPGQGLEWVSAISGRVSAISGSGGITYYADSVKGRFIISRDNSKNTLYLQMSGLRAEDTAVYYCAKGPYLTTVTPFDYWGQGTLVTVSS

SEQ ID NO: 963 - DNA, 24 bp, synthetic construct
  misc_feature 1..24: note = Description of Artificial Sequence: Synthetic oligonucleotide
  source 1..24: mol_type = other DNA
tatttcacctttagcagttttgcc

SEQ ID NO: 964 - protein, 8 aa, synthetic construct
  REGION 1..8: note = Description of Artificial Sequence: Synthetic peptide
YFTFSSFA

SEQ ID NO: 965 - DNA, 24 bp, synthetic construct
  misc_feature 1..24: note = Description of Artificial Sequence: Synthetic oligonucleotide
  source 1..24: mol_type = other DNA
attagtggtagtggtggtatcaca

SEQ ID NO: 966 - protein, 8 aa, synthetic construct
  REGION 1..8: note = Description of Artificial Sequence: Synthetic peptide
ISGSGGIT

SEQ ID NO: 967 - DNA, 42 bp, synthetic construct
  misc_feature 1..42: note = Description of Artificial Sequence: Synthetic oligonucleotide
  source 1..42: mol_type = other DNA
gcgaaaggcccctatttgactacagtcaccccctttgactac

SEQ ID NO: 968 - protein, 14 aa, synthetic construct
  REGION 1..14: note = Description of Artificial Sequence: Synthetic peptide
AKGPYLTTVTPFDY

SEQ ID NO: 969 - DNA, 324 bp, synthetic construct
  misc_feature 1..324: note = Description of Artificial Sequence: Synthetic polynucleotide
  source 1..324: mol_type = other DNA
gacatccagttgacccagtctccatcttccgtgtctgcatctgtcggagacagagtcaccatcacttgtcgggcgagtcaggggattagcagctggttagcctggtatcagcagaaaccagggaaagcccctaaactcctgatctatgctgtatccagtttgcaaaatggggtcccatcaaggttcagcggcagtggatctgggacagatttcaccctcaccatcagcagcctgcagcctgaagactttgcaacttactattgtcaacaggctaacagtttcccattcactttcggccctgggaccaagctggagatcaaacga

SEQ ID NO: 970 - protein, 108 aa, synthetic construct
  REGION 1..108: note = Description of Artificial Sequence: Synthetic polypeptide
DIQLTQSPSSVSASVGDRVTITCRASQGISSWLAWYQQKPGKAPKLLIYAVSSLQNGVPSRFSGSGSGTDFTLTISSLQPEDFATYYCQQANSFPFTFGPGTKLEIKR

SEQ ID NO: 971 - DNA, 18 bp, synthetic construct
  misc_feature 1..18: note = Description of Artificial Sequence: Synthetic oligonucleotide
  source 1..18: mol_type = other DNA
caggggattagcagctgg

SEQ ID NO: 972 - protein, 6 aa, synthetic construct
  REGION 1..6: note = Description of Artificial Sequence: Synthetic peptide
QGISSW

SEQ ID NO: 973-974 - skipped (2 entries)

SEQ ID NO: 975 - DNA, 27 bp, synthetic construct
  misc_feature 1..27: note = Description of Artificial Sequence: Synthetic oligonucleotide
  source 1..27: mol_type = other DNA
caacaggctaacagtttcccattcact

SEQ ID NO: 976 - protein, 9 aa, synthetic construct
  REGION 1..9: note = Description of Artificial Sequence: Synthetic peptide
QQANSFPFT

SEQ ID NO: 977 - DNA, 369 bp, synthetic construct
  misc_feature 1..369: note = Description of Artificial Sequence: Synthetic polynucleotide
  source 1..369: mol_type = other DNA
gaggtgcagctggtggagtctgggggaggcttggtacagcctggcaggtccctgagactctcctgtgcagcctctggattcacctttgctgattatgccatgcactgggtccggcaagctccagggaagggcctggagtgggtctcaggtattagttggaatagtggtagtataggttatgcggactctgtgaagggccgattcaccatctccagagacaacgccaagaactccctgtatctgcaaatgaacagtctgagagctgaggacacggccttatattactgtgtaaaagataatagtggctacgcatcctactactacggtatggacgtctggggccaagggaccacggtcaccgtctcctca

SEQ ID NO: 978 - protein, 123 aa, synthetic construct
  REGION 1..123: note = Description of Artificial Sequence: Synthetic polypeptide
EVQLVESGGGLVQPGRSLRLSCAASGFTFADYAMHWVRQAPGKGLEWVSGISWNSGSIGYADSVKGRFTISRDNAKNSLYLQMNSLRAEDTALYYCVKDNSGYASYYYGMDVWGQGTTVTVSS

SEQ ID NO: 979 - DNA, 24 bp, synthetic construct
  misc_feature 1..24: note = Description of Artificial Sequence: Synthetic oligonucleotide
  source 1..24: mol_type = other DNA
ggattcacctttgctgattatgcc

SEQ ID NO: 980 - protein, 8 aa, synthetic construct
  REGION 1..8: note = Description of Artificial Sequence: Synthetic peptide
GFTFADYA

SEQ ID NO: 981 - DNA, 24 bp, synthetic construct
  misc_feature 1..24: note = Description of Artificial Sequence: Synthetic oligonucleotide
  source 1..24: mol_type = other DNA
attagttggaatagtggtagtata

SEQ ID NO: 982 - protein, 8 aa, synthetic construct
  REGION 1..8: note = Description of Artificial Sequence: Synthetic peptide
ISWNSGSI

SEQ ID NO: 983 - DNA, 48 bp, synthetic construct
  misc_feature 1..48: note = Description of Artificial Sequence: Synthetic oligonucleotide
  source 1..48: mol_type = other DNA
gtaaaagataatagtggctacgcatcctactactacggtatggacgtc

SEQ ID NO: 984 - protein, 16 aa, synthetic construct
  REGION 1..16: note = Description of Artificial Sequence: Synthetic peptide
VKDNSGYASYYYGMDV

SEQ ID NO: 985 - DNA, 324 bp, synthetic construct
  misc_feature 1..324: note = Description of Artificial Sequence: Synthetic polynucleotide
  source 1..324: mol_type = other DNA
gacatccagttgacccagtccccatcctccctgtctgcatctgtaggagacagagtcaccatcacttgccgggcaagtcagagcattagcagctatttaaattggtatcagcagaaaccagggaaagcccctaagctcctgatctacgatgcatccaatttggaaacaggggtcccatcaaggttcagtggaagtggatctgggacagattttactttcaccatcagcagcctgcagcctgaagatattgcaacatattactgtcaacagtatgataatctcccattcactttcggccctgggaccaaagtggatatcaaacga

SEQ ID NO: 986 - protein, 108 aa, synthetic construct
  REGION 1..108: note = Description of Artificial Sequence: Synthetic polypeptide
DIQLTQSPSSLSASVGDRVTITCRASQSISSYLNWYQQKPGKAPKLLIYDASNLETGVPSRFSGSGSGTDFTFTISSLQPEDIATYYCQQYDNLPFTFGPGTKVDIKR

SEQ ID NO: 987 - DNA, 18 bp, synthetic construct
  misc_feature 1..18: note = Description of Artificial Sequence: Synthetic oligonucleotide
  source 1..18: mol_type = other DNA
cagagcattagcagctat

SEQ ID NO: 988 - protein, 6 aa, synthetic construct
  REGION 1..6: note = Description of Artificial Sequence: Synthetic peptide
QSISSY

SEQ ID NO: 989-990 - skipped (2 entries)

SEQ ID NO: 991 - DNA, 27 bp, synthetic construct
  misc_feature 1..27: note = Description of Artificial Sequence: Synthetic oligonucleotide
  source 1..27: mol_type = other DNA
caacagtatgataatctcccattcact

SEQ ID NO: 992 - protein, 9 aa, synthetic construct
  REGION 1..9: note = Description of Artificial Sequence: Synthetic peptide
QQYDNLPFT

SEQ ID NO: 993 - DNA, 378 bp, synthetic construct
  misc_feature 1..378: note = Description of Artificial Sequence: Synthetic polynucleotide
  source 1..378: mol_type = other DNA
gaggtgcagctggtggagtctgggggaggcgtggtccagcctgggaggtccctgagactctcctgtgcagcctctggattcaccttcagtaactatggcatgcactgggtccgccaggctccaggcaaagggctggagtgggtgacagttatattacatgatggaagttataaatactatgcagactccgtgaagggccgattcaccatctccagagacaattccaagaacacgctacatctgcaaatgaacagcctgagaactgaggacacggctgtatattactgtgcgaaagggcctatgtttcggggagtcccttacaaccactactatggtatggacgtctggggccaagggaccacggtcaccgtctcctca

SEQ ID NO: 994 - protein, 126 aa, synthetic construct
  REGION 1..126: note = Description of Artificial Sequence: Synthetic polypeptide
EVQLVESGGGVVQPGRSLRLSCAASGFTFSNYGMHWVRQAPGKGLEWVTVILHDGSYKYYADSVKGRFTISRDNSKNTLHLQMNSLRTEDTAVYYCAKGPMFRGVPYNHYYGMDVWGQGTTVTVSS

SEQ ID NO: 995 - DNA, 24 bp, synthetic construct
  misc_feature 1..24: note = Description of Artificial Sequence: Synthetic oligonucleotide
  source 1..24: mol_type = other DNA
ggattcaccttcagtaactatggc

SEQ ID NO: 996 - protein, 8 aa, synthetic construct
  REGION 1..8: note = Description of Artificial Sequence: Synthetic peptide
GFTFSNYG

SEQ ID NO: 997 - DNA, 24 bp, synthetic construct
  misc_feature 1..24: note = Description of Artificial Sequence: Synthetic oligonucleotide
  source 1..24: mol_type = other DNA
atattacatgatggaagttataaa

SEQ ID NO: 998 - protein, 8 aa, synthetic construct
  REGION 1..8: note = Description of Artificial Sequence: Synthetic peptide
ILHDGSYK

SEQ ID NO: 999 - DNA, 57 bp, synthetic construct
  misc_feature 1..57: note = Description of Artificial Sequence: Synthetic oligonucleotide
  source 1..57: mol_type = other DNA
gcgaaagggcctatgtttcggggagtcccttacaaccactactatggtatggacgtc

SEQ ID NO: 1000 - protein, 19 aa, synthetic construct
  REGION 1..19: note = Description of Artificial Sequence: Synthetic peptide
AKGPMFRGVPYNHYYGMDV

SEQ ID NO: 1001 - DNA, 324 bp, synthetic construct
  misc_feature 1..324: note = Description of Artificial Sequence: Synthetic polynucleotide
  source 1..324: mol_type = other DNA
gacatccagatgacccagtctccatcctccctgtctgcatctgtaggagacagagtcaccatcacttgccgggcaagtcagggcatcagaaatgatttaggctggtatcagcagaaaccagggaaagcccctaagcgcctgatctatgctgcatccagtttgcaaagtggggtctcatcaaggttcagcggcagtggatctgggacagaattcactctcacaatcagcagcctgcagcctgaagattttgcaacttattactgtctacagcataatagttacccgtacacttttggccaggggaccaaggtggaaatcaaacga

SEQ ID NO: 1002 - protein, 108 aa, synthetic construct
  REGION 1..108: note = Description of Artificial Sequence: Synthetic polypeptide
DIQMTQSPSSLSASVGDRVTITCRASQGIRNDLGWYQQKPGKAPKRLIYAASSLQSGVSSRFSGSGSGTEFTLTISSLQPEDFATYYCLQHNSYPYTFGQGTKVEIKR

SEQ ID NO: 1003 - DNA, 18 bp, synthetic construct
  misc_feature 1..18: note = Description of Artificial Sequence: Synthetic oligonucleotide
  source 1..18: mol_type = other DNA
cagggcatcagaaatgat

SEQ ID NO: 1004 - protein, 6 aa, synthetic construct
  REGION 1..6: note = Description of Artificial Sequence: Synthetic peptide
QGIRND

SEQ ID NO: 1005-1006 - skipped (2 entries)

SEQ ID NO: 1007 - DNA, 27 bp, synthetic construct
  misc_feature 1..27: note = Description of Artificial Sequence: Synthetic oligonucleotide
  source 1..27: mol_type = other DNA
ctacagcataatagttacccgtacact

SEQ ID NO: 1008 - protein, 9 aa, synthetic construct
  REGION 1..9: note = Description of Artificial Sequence: Synthetic peptide
LQHNSYPYT

SEQ ID NO: 1009 - DNA, 357 bp, synthetic construct
  misc_feature 1..357: note = Description of Artificial Sequence: Synthetic polynucleotide
  source 1..357: mol_type = other DNA
gaggtgcagctggtggagtctgggggaggcgtggtccagcctgggaggtccctgagactctcctgtacagcgtcaggtttccccttcagtcgctatggcatgcactgggtccgccaggctccaggcaaggggctggaatgggtgacatttatatggtatgatggaagtaataaatactatgcagactccgcgaagggccgattcaccatcaccagagacaattccaagaacacggtgtatctgcaaatggacagcctgagagccgatgacacggctgtttattattgtgtgagagatcaggcagctctctactattttgactcttggggccagggaaccctggtcaccgtctcctca

SEQ ID NO: 1010 - protein, 119 aa, synthetic construct
  REGION 1..119: note = Description of Artificial Sequence: Synthetic polypeptide
EVQLVESGGGVVQPGRSLRLSCTASGFPFSRYGMHWVRQAPGKGLEWVTFIWYDGSNKYYADSAKGRFTITRDNSKNTVYLQMDSLRADDTAVYYCVRDQAALYYFDSWGQGTLVTVSS

SEQ ID NO: 1011 - DNA, 24 bp, synthetic construct
  misc_feature 1..24: note = Description of Artificial Sequence: Synthetic oligonucleotide
  source 1..24: mol_type = other DNA
ggtttccccttcagtcgctatggc

SEQ ID NO: 1012 - protein, 8 aa, synthetic construct
  REGION 1..8: note = Description of Artificial Sequence: Synthetic peptide
GFPFSRYG

SEQ ID NO: 1013 - DNA, 24 bp, synthetic construct
  misc_feature 1..24: note = Description of Artificial Sequence: Synthetic oligonucleotide
  source 1..24: mol_type = other DNA
atatggtatgatggaagtaataaa

SEQ ID NO: 1014 - protein, 8 aa, synthetic construct
  REGION 1..8: note = Description of Artificial Sequence: Synthetic peptide
IWYDGSNK

SEQ ID NO: 1015 - DNA, 36 bp, synthetic construct
  misc_feature 1..36: note = Description of Artificial Sequence: Synthetic oligonucleotide
  source 1..36: mol_type = other DNA
gtgagagatcaggcagctctctactattttgactct

SEQ ID NO: 1016 - protein, 12 aa, synthetic construct
  REGION 1..12: note = Description of Artificial Sequence: Synthetic peptide
VRDQAALYYFDS

SEQ ID NO: 1017 - DNA, 324 bp, synthetic construct
  misc_feature 1..324: note = Description of Artificial Sequence: Synthetic polynucleotide
  source 1..324: mol_type = other DNA
gacatccagatgacccagtctccatcttccgtgtctgcatctgtaggagacagagtcaccatcacttgtcgggcgagtcagggtattagcaggtggttagcctggtatcagcagaaaccagggaaagcccctaagctcctgatctctgctgcatccagtttgcaaagtggagtcccatcaaggttcagcggcagtggatctgggacagatttcactctcaccatcagcggcctgcagcctgaagattttgcaacttactattgtcaaaaggctaacagtttccctttcactttcggccctgggaccaagctggagatcaaacga

SEQ ID NO: 1018 - protein, 108 aa, synthetic construct
  REGION 1..108: note = Description of Artificial Sequence: Synthetic polypeptide
DIQMTQSPSSVSASVGDRVTITCRASQGISRWLAWYQQKPGKAPKLLISAASSLQSGVPSRFSGSGSGTDFTLTISGLQPEDFATYYCQKANSFPFTFGPGTKLEIKR

SEQ ID NO: 1019 - DNA, 18 bp, synthetic construct
  misc_feature 1..18: note = Description of Artificial Sequence: Synthetic oligonucleotide
  source 1..18: mol_type = other DNA
cagggtattagcaggtgg

SEQ ID NO: 1020 - protein, 6 aa, synthetic construct
  REGION 1..6: note = Description of Artificial Sequence: Synthetic peptide
QGISRW

SEQ ID NO: 1021-1022 - skipped (2 entries)

SEQ ID NO: 1023 - DNA, 27 bp, synthetic construct
  misc_feature 1..27: note = Description of Artificial Sequence: Synthetic oligonucleotide
  source 1..27: mol_type = other DNA
caaaaggctaacagtttccctttcact

SEQ ID NO: 1024 - protein, 9 aa, synthetic construct
  REGION 1..9: note = Description of Artificial Sequence: Synthetic peptide
QKANSFPFT

SEQ ID NO: 1025 - DNA, 378 bp, synthetic construct
  misc_feature 1..378: note = Description of Artificial Sequence: Synthetic polynucleotide
  source 1..378: mol_type = other DNA
gaggtgcagctggtggagtctgggggaggcgtggtccagcctgggaggtccctgagactctcctgtgcagcctctggattcaccttcagtagttatggcatgcactgggtccgccaggctccaggcaaggggctggagtgggtgacagttatattacatgatggaagtaatagatactctgcagactccgtgaagggccgattcaccatctccagagacaattccaagaacacgctttatctgcaaatgaacatcctgagagttgaggacacggctgtgtattactgtacgaaaggggctatggttcggggagtcccttacaatcactactacggcatggacgtctggggccaagggaccacggtcaccgtctcctca

SEQ ID NO: 1026 - protein, 126 aa, synthetic construct
  REGION 1..126: note = Description of Artificial Sequence: Synthetic polypeptide
EVQLVESGGGVVQPGRSLRLSCAASGFTFSSYGMHWVRQAPGKGLEWVTVILHDGSNRYSADSVKGRFTISRDNSKNTLYLQMNILRVEDTAVYYCTKGAMVRGVPYNHYYGMDVWGQGTTVTVSS

SEQ ID NO: 1027 - DNA, 24 bp, synthetic construct
  misc_feature 1..24: note = Description of Artificial Sequence: Synthetic oligonucleotide
  source 1..24: mol_type = other DNA
ggattcaccttcagtagttatggc

SEQ ID NO: 1028 - protein, 8 aa, synthetic construct
  REGION 1..8: note = Description of Artificial Sequence: Synthetic peptide
GFTFSSYG

SEQ ID NO: 1029 - DNA, 24 bp, synthetic construct
  misc_feature 1..24: note = Description of Artificial Sequence: Synthetic oligonucleotide
  source 1..24: mol_type = other DNA
atattacatgatggaagtaataga

SEQ ID NO: 1030 - protein, 8 aa, synthetic construct
  REGION 1..8: note = Description of Artificial Sequence: Synthetic peptide
ILHDGSNR

SEQ ID NO: 1031 - DNA, 57 bp, synthetic construct
  misc_feature 1..57: note = Description of Artificial Sequence: Synthetic oligonucleotide
  source 1..57: mol_type = other DNA
acgaaaggggctatggttcggggagtcccttacaatcactactacggcatggacgtc

SEQ ID NO: 1032 - protein, 19 aa, synthetic construct
  REGION 1..19: note = Description of Artificial Sequence: Synthetic peptide
TKGAMVRGVPYNHYYGMDV

SEQ ID NO: 1033 - DNA, 324 bp, synthetic construct
  misc_feature 1..324: note = Description of Artificial Sequence: Synthetic polynucleotide
  source 1..324: mol_type = other DNA
gacatccagatgacccagtctccatcctccctgtctgcatctgtaggagacagagtcaccatcacttgccgggcaagtcagggcattagaaatgatttaggctggtatcagcagaaaccagggaaagcccctaagcgcctaatctatgctgcatccattttgcaaagtggggtcccatcaaggttcagcggcagtggatctgggacagaattcactctcacaatcagcagcctgcagcctgaagattttgcaacttattactgtctacagcataatagttacccgtacacttttggccaggggaccaagctggagatcaaacga

SEQ ID NO: 1034 - protein, 108 aa, synthetic construct
  REGION 1..108: note = Description of Artificial Sequence: Synthetic polypeptide
DIQMTQSPSSLSASVGDRVTITCRASQGIRNDLGWYQQKPGKAPKRLIYAASILQSGVPSRFSGSGSGTEFTLTISSLQPEDFATYYCLQHNSYPYTFGQGTKLEIKR

SEQ ID NO: 1035 - DNA, 18 bp, synthetic construct
  misc_feature 1..18: note = Description of Artificial Sequence: Synthetic oligonucleotide
  source 1..18: mol_type = other DNA
cagggcattagaaatgat

SEQ ID NO: 1036 - protein, 6 aa, synthetic construct
  REGION 1..6: note = Description of Artificial Sequence: Synthetic peptide
QGIRND

SEQ ID NO: 1037-1038 - skipped (2 entries)

SEQ ID NO: 1039 - DNA, 27 bp, synthetic construct
  misc_feature 1..27: note = Description of Artificial Sequence: Synthetic oligonucleotide
  source 1..27: mol_type = other DNA
ctacagcataatagttacccgtacact

SEQ ID NO: 1040 - protein, 9 aa, synthetic construct
  REGION 1..9: note = Description of Artificial Sequence: Synthetic peptide
LQHNSYPYT

SEQ ID NO: 1041 - DNA, 378 bp, synthetic construct
  misc_feature 1..378: note = Description of Artificial Sequence: Synthetic polynucleotide
  source 1..378: mol_type = other DNA
gaggtgcagctggtggagtctgggggaggcgtggtccagcctgggaggtccctgagactctcctgtgcagcctctggattcaccttcagtagctatggcatgcactgggtccgccaggctccaggcaaggggctggagtgggtgacagttatattacatgatggaagtaatagatactatgcagactccgtgaagggccgattcaccatctccagagacaattccaagaacacgctttatctgcaaatgaacatcctgagagctgaggacacggctgtgtattactgtacgaaaggggctatggttcggggagtcccttacaatcactactacggcatggacgtctggggccaagggaccacggtcaccgtctcctca

SEQ ID NO: 1042 - protein, 126 aa, synthetic construct
  REGION 1..126: note = Description of Artificial Sequence: Synthetic polypeptide
EVQLVESGGGVVQPGRSLRLSCAASGFTFSSYGMHWVRQAPGKGLEWVTVILHDGSNRYYADSVKGRFTISRDNSKNTLYLQMNILRAEDTAVYYCTKGAMVRGVPYNHYYGMDVWGQGTTVTVSS

SEQ ID NO: 1043 - DNA, 24 bp, synthetic construct
  misc_feature 1..24: note = Description of Artificial Sequence: Synthetic oligonucleotide
  source 1..24: mol_type = other DNA
ggattcaccttcagtagctatggc

SEQ ID NO: 1044 - protein, 8 aa, synthetic construct
  REGION 1..8: note = Description of Artificial Sequence: Synthetic peptide
GFTFSSYG

SEQ ID NO: 1045 - DNA, 24 bp, synthetic construct
  misc_feature 1..24: note = Description of Artificial Sequence: Synthetic oligonucleotide
  source 1..24: mol_type = other DNA
atattacatgatggaagtaataga

SEQ ID NO: 1046 - protein, 8 aa, synthetic construct
  REGION 1..8: note = Description of Artificial Sequence: Synthetic peptide
ILHDGSNR

SEQ ID NO: 1047 - DNA, 57 bp, synthetic construct; identical to SEQ ID NO: 1031
  misc_feature 1..57: note = Description of Artificial Sequence: Synthetic oligonucleotide
  source 1..57: mol_type = other DNA

SEQ ID NO: 1048 - protein, 19 aa, synthetic construct
  REGION 1..19: note = Description of Artificial Sequence: Synthetic peptide
TKGAMVRGVPYNHYYGMDV

SEQ ID NO: 1049 - DNA, 324 bp, synthetic construct
  misc_feature 1..324: note = Description of Artificial Sequence: Synthetic polynucleotide
  source 1..324: mol_type = other DNA
gacatcgtgatgacccagtctccatcctccctgtctgcatctgtaggagacagagtcaccatcacttgccgggcaagtcagggcattagaaatgatttaggctggtatcagcagaaaccagggaaagcccctaagcgcctgatctatgctgcatccaatttgcaaagtggggtcccatcaaggttcagcggcagtggatctgggacagaattcactctcacaatcagcagcctgcagcctgaagattttgcaacttattactgtctacagcataatagttacccgtacacttttggccaggggaccaagctggagatcaaacga

SEQ ID NO: 1050 - protein, 108 aa, synthetic construct
  REGION 1..108: note = Description of Artificial Sequence: Synthetic polypeptide
DIVMTQSPSSLSASVGDRVTITCRASQGIRNDLGWYQQKPGKAPKRLIYAASNLQSGVPSRFSGSGSGTEFTLTISSLQPEDFATYYCLQHNSYPYTFGQGTKLEIKR

SEQ ID NO: 1051 - DNA, 18 bp, synthetic construct
  misc_feature 1..18: note = Description of Artificial Sequence: Synthetic oligonucleotide
  source 1..18: mol_type = other DNA
cagggcattagaaatgat

SEQ ID NO: 1052 - protein, 6 aa, synthetic construct
  REGION 1..6: note = Description of Artificial Sequence: Synthetic peptide
QGIRND

SEQ ID NO: 1053-1054 - skipped (2 entries)

SEQ ID NO: 1055 - DNA, 27 bp, synthetic construct
  misc_feature 1..27: note = Description of Artificial Sequence: Synthetic oligonucleotide
  source 1..27: mol_type = other DNA
ctacagcataatagttacccgtacact

SEQ ID NO: 1056 - protein, 9 aa, synthetic construct
  REGION 1..9: note = Description of Artificial Sequence: Synthetic peptide
LQHNSYPYT

SEQ ID NO: 1057 - DNA, 378 bp, synthetic construct
  misc_feature 1..378: note = Description of Artificial Sequence: Synthetic polynucleotide
  source 1..378: mol_type = other DNA
caggtgcagctggtggagtctgggggaggcgtggtccagcctgggaggtccctgagactctcctgtgcagcctctggattcaccttcagtagctatggcatgcactgggtccgccaggctccaggcaaggggctggagtgggtggcagttatatcatatgatggaagtaataaatactatgcagactccgtgaagggccgattcaccatctccagagactattccaagaacacgctgtatctgcaaatgaacagcctgagagctgaggacacggctgtgttttactgtgcgaaaggggctatggttcggggagtcccttacaactactactacggtatggacgtctggggccaagggaccacggtcaccgtctcctca

SEQ ID NO: 1058 - protein, 126 aa, synthetic construct
  REGION 1..126: note = Description of Artificial Sequence: Synthetic polypeptide
QVQLVESGGGVVQPGRSLRLSCAASGFTFSSYGMHWVRQAPGKGLEWVAVISYDGSNKYYADSVKGRFTISRDYSKNTLYLQMNSLRAEDTAVFYCAKGAMVRGVPYNYYYGMDVWGQGTTVTVSS

SEQ ID NO: 1059 - DNA, 24 bp, synthetic construct
  misc_feature 1..24: note = Description of Artificial Sequence: Synthetic oligonucleotide
  source 1..24: mol_type = other DNA
ggattcaccttcagtagctatggc

SEQ ID NO: 1060 - protein, 8 aa, synthetic construct
  REGION 1..8: note = Description of Artificial Sequence: Synthetic peptide
GFTFSSYG

SEQ ID NO: 1061 - DNA, 24 bp, synthetic construct
  misc_feature 1..24: note = Description of Artificial Sequence: Synthetic oligonucleotide
  source 1..24: mol_type = other DNA
atatcatatgatggaagtaataaa

SEQ ID NO: 1062 - protein, 8 aa, synthetic construct
  REGION 1..8: note = Description of Artificial Sequence: Synthetic peptide
ISYDGSNK

SEQ ID NO: 1063 - DNA, 57 bp, synthetic construct
  misc_feature 1..57: note = Description of Artificial Sequence: Synthetic oligonucleotide
  source 1..57: mol_type = other DNA
gcgaaaggggctatggttcggggagtcccttacaactactactacggtatggacgtc

SEQ ID NO: 1064 - protein, 19 aa, synthetic construct
  REGION 1..19: note = Description of Artificial Sequence: Synthetic peptide
AKGAMVRGVPYNYYYGMDV

SEQ ID NO: 1065 - DNA, 321 bp, synthetic construct
  misc_feature 1..321: note = Description of Artificial Sequence: Synthetic polynucleotide
  source 1..321: mol_type = other DNA
gacatccagatgacccagtctccatcctccctgtctgcatctgtaggagacagagtcaccatcacttgccgggcaagtcagggcattagaaatgatttaggctggtttcagcagaaaccagggaaagcccctaagcgcctgatctatgctgcatccagtttgcaaagtggggtcccatcaaggttcagcggcagtggatctgggacagaattcactctcacaatcagcagcctgcagcctgaagattttgcaacttattactgtctacagcataatagttacccgtacacttttggccaggggaccaagctggagatcaaa

SEQ ID NO: 1066 - protein, 107 aa, synthetic construct
  REGION 1..107: note = Description of Artificial Sequence: Synthetic polypeptide
DIQMTQSPSSLSASVGDRVTITCRASQGIRNDLGWFQQKPGKAPKRLIYAASSLQSGVPSRFSGSGSGTEFTLTISSLQPEDFATYYCLQHNSYPYTFGQGTKLEIK

SEQ ID NO: 1067 - DNA, 18 bp, synthetic construct
  misc_feature 1..18: note = Description of Artificial Sequence: Synthetic oligonucleotide
  source 1..18: mol_type = other DNA
cagggcattagaaatgat

SEQ ID NO: 1068 - protein, 6 aa, synthetic construct
  REGION 1..6: note = Description of Artificial Sequence: Synthetic peptide
QGIRND

SEQ ID NO: 1069-1070 - skipped (2 entries)

SEQ ID NO: 1071 - DNA, 27 bp, synthetic construct
  misc_feature 1..27: note = Description of Artificial Sequence: Synthetic oligonucleotide
  source 1..27: mol_type = other DNA
ctacagcataatagttacccgtacact

SEQ ID NO: 1072 - protein, 9 aa, synthetic construct
  REGION 1..9: note = Description of Artificial Sequence: Synthetic peptide
LQHNSYPYT

SEQ ID NO: 1073 - DNA, 378 bp, synthetic construct
  misc_feature 1..378: note = Description of Artificial Sequence: Synthetic polynucleotide
  source 1..378: mol_type = other DNA
caggtgcagctggtggagtctgggggaggcgtggtccagcctgggaggtccctgagactctcctgtgcagcctctggactcaccttcagtagctatggcatgcactgggtccgccaggctccaggcaaggggctggagtgggtggcagttatatcatatgatggaagtaataaatactatacagactccgtgaagggccgattcaccatctccagagacaattctaagaacacgctgtatctgcaaatgaacagcctgagagctgaggacacggctgtgtattactgtgcgaaaggggccatggttcggggagtcccttacaactactactacggtatggacgtctggggccaagggaccacggtcaccgtctcctca

SEQ ID NO: 1074 - protein, 126 aa, synthetic construct
  REGION 1..126: note = Description of Artificial Sequence: Synthetic polypeptide
QVQLVESGGGVVQPGRSLRLSCAASGLTFSSYGMHWVRQAPGKGLEWVAVISYDGSNKYYTDSVKGRFTISRDNSKNTLYLQMNSLRAEDTAVYYCAKGAMVRGVPYNYYYGMDVWGQGTTVTVSS

SEQ ID NO: 1075 - DNA, 24 bp, synthetic construct
  misc_feature 1..24: note = Description of Artificial Sequence: Synthetic oligonucleotide
  source 1..24: mol_type = other DNA
ggactcaccttcagtagctatggc

SEQ ID NO: 1076 - protein, 8 aa, synthetic construct
  REGION 1..8: note = Description of Artificial Sequence: Synthetic peptide
GLTFSSYG

SEQ ID NO: 1077 - DNA, 24 bp, synthetic construct
  misc_feature 1..24: note = Description of Artificial Sequence: Synthetic oligonucleotide
  source 1..24: mol_type = other DNA
atatcatatgatggaagtaataaa

SEQ ID NO: 1078 - protein, 8 aa, synthetic construct
  REGION 1..8: note = Description of Artificial Sequence: Synthetic peptide
ISYDGSNK

SEQ ID NO: 1079 - DNA, 57 bp, synthetic construct
  misc_feature 1..57: note = Description of Artificial Sequence: Synthetic oligonucleotide
  source 1..57: mol_type = other DNA
gcgaaaggggccatggttcggggagtcccttacaactactactacggtatggacgtc

SEQ ID NO: 1080 - protein, 19 aa, synthetic construct
  REGION 1..19: note = Description of Artificial Sequence: Synthetic peptide
AKGAMVRGVPYNYYYGMDV

SEQ ID NO: 1081 - DNA, 321 bp, synthetic construct
  misc_feature 1..321: note = Description of Artificial Sequence: Synthetic polynucleotide
  source 1..321: mol_type = other DNA
gacatccagatgacccagtctccatcctccctgtctgcatctgtaggagacagagtcaccatcacttgccgggcaagtcagggcattagaaatgatttaggctggtatcagcagaaaccagggaaagcccctaagcgcctgatctatgctgcgtccagtttgcaaagtggggtcccatcaaggttcagcggcagtggatctgggacagaattcactctcacaatcagcagcctgcagcctgaagattttgcaacttattactgtctacagcataatagttacccgtacacttttggccaggggaccaagctggagatcaaa

SEQ ID NO: 1082 - protein, 107 aa, synthetic construct
  REGION 1..107: note = Description of Artificial Sequence: Synthetic polypeptide
DIQMTQSPSSLSASVGDRVTITCRASQGIRNDLGWYQQKPGKAPKRLIYAASSLQSGVPSRFSGSGSGTEFTLTISSLQPEDFATYYCLQHNSYPYTFGQGTKLEIK

SEQ ID NO: 1083 - DNA, 18 bp, synthetic construct
  misc_feature 1..18: note = Description of Artificial Sequence: Synthetic oligonucleotide
  source 1..18: mol_type = other DNA
cagggcattagaaatgat

SEQ ID NO: 1084 - protein, 6 aa, synthetic construct
  REGION 1..6: note = Description of Artificial Sequence: Synthetic peptide
QGIRND

SEQ ID NO: 1085-1086 - skipped (2 entries)

SEQ ID NO: 1087 - DNA, 27 bp, synthetic construct
  misc_feature 1..27: note = Description of Artificial Sequence: Synthetic oligonucleotide
  source 1..27: mol_type = other DNA
ctacagcataatagttacccgtacact

SEQ ID NO: 1088 - protein, 9 aa, synthetic construct
  REGION 1..9: note = Description of Artificial Sequence: Synthetic peptide
LQHNSYPYT

SEQ ID NO: 1089 - DNA, 378 bp, synthetic construct
  misc_feature 1..378: note = Description of Artificial Sequence: Synthetic polynucleotide
  source 1..378: mol_type = other DNA
caggtgcagctggtggagtctgggggaggcgtggtccagcctgggaggtccctgagactctcctgtgcagcctctggattcaccttcaggagctttggcatgcactgggtccgccaggctccaggcaaggggctggagtgggtggcagttatttcatatgatggaaattataaatactatgcagactccgtgaagggccgattcaccatctccagagacaattccaagaacacgctgtatctgcaaatgaacagcctgagagctgaggacacggctgtacattactgtgcgaaaggggctatggttcggggagtcccttacaacttctactacggtatggacgtctggggccaagggaccacggtcaccgtctcctca

SEQ ID NO: 1090 - protein, 126 aa, synthetic construct
  REGION 1..126: note = Description of Artificial Sequence: Synthetic polypeptide
QVQLVESGGGVVQPGRSLRLSCAASGFTFRSFGMHWVRQAPGKGLEWVAVISYDGNYKYYADSVKGRFTISRDNSKNTLYLQMNSLRAEDTAVHYCAKGAMVRGVPYNFYYGMDVWGQGTTVTVSS

SEQ ID NO: 1091 - DNA, 24 bp, synthetic construct
  misc_feature 1..24: note = Description of Artificial Sequence: Synthetic oligonucleotide
  source 1..24: mol_type = other DNA
ggattcaccttcaggagctttggc

SEQ ID NO: 1092 - protein, 8 aa, synthetic construct
  REGION 1..8: note = Description of Artificial Sequence: Synthetic peptide
GFTFRSFG

SEQ ID NO: 1093 - DNA, 24 bp, synthetic construct
  misc_feature 1..24: note = Description of Artificial Sequence: Synthetic oligonucleotide
  source 1..24: mol_type = other DNA
atttcatatgatggaaattataaa

SEQ ID NO: 1094 - protein, 8 aa, synthetic construct
  REGION 1..8: note = Description of Artificial Sequence: Synthetic peptide
ISYDGNYK

SEQ ID NO: 1095 - DNA, 57 bp, synthetic construct
  misc_feature 1..57: note = Description of Artificial Sequence: Synthetic oligonucleotide
  source 1..57: mol_type = other DNA
gcgaaaggggctatggttcggggagtcccttacaacttctactacggtatggacgtc

SEQ ID NO: 1096 - protein, 19 aa, synthetic construct
  REGION 1..19: note = Description of Artificial Sequence: Synthetic peptide
AKGAMVRGVPYNFYYGMDV

SEQ ID NO: 1097 - DNA, 321 bp, synthetic construct
  misc_feature 1..321: note = Description of Artificial Sequence: Synthetic polynucleotide
  source 1..321: mol_type = other DNA
gacatccagatgacccagtctccatcctccctgtctgcatctgtaggagacagagtcaccatcacttgccgggcaagtcaggtcattagaaatgatttaggctggtatcagcagaaaccagggaaagcccctaagcgcctgatctatgctgcatccagtttgcaaagtgggatcccatcaaggttcagcggcagtggatctgggacagaattcactctcacaatcagcagcctgcagcctgaagattttgcaacttattactgtctacagcataatagttacccgtacacttttggccaggggaccaagctggagatcaaa

SEQ ID NO: 1098 - protein, 107 aa, synthetic construct
  REGION 1..107: note = Description of Artificial Sequence: Synthetic polypeptide
DIQMTQSPSSLSASVGDRVTITCRASQVIRNDLGWYQQKPGKAPKRLIYAASSLQSGIPSRFSGSGSGTEFTLTISSLQPEDFATYYCLQHNSYPYTFGQGTKLEIK

SEQ ID NO: 1099 - DNA, 18 bp, synthetic construct
  misc_feature 1..18: note = Description of Artificial Sequence: Synthetic oligonucleotide
  source 1..18: mol_type = other DNA
caggtcattagaaatgat

SEQ ID NO: 1100 - protein, 6 aa, synthetic construct
  REGION 1..6: note = Description of Artificial Sequence: Synthetic peptide
QVIRND

SEQ ID NO: 1101-1102 - skipped (2 entries)

SEQ ID NO: 1103 - DNA, 27 bp, synthetic construct
  misc_feature 1..27: note = Description of Artificial Sequence: Synthetic oligonucleotide
  source 1..27: mol_type = other DNA
ctacagcataatagttacccgtacact

SEQ ID NO: 1104 - protein, 9 aa, synthetic construct
  REGION 1..9: note = Description of Artificial Sequence: Synthetic peptide
LQHNSYPYT

SEQ ID NO: 1105 - DNA, 369 bp, synthetic construct
  misc_feature 1..369: note = Description of Artificial Sequence: Synthetic polynucleotide
  source 1..369: mol_type = other DNA
gaggtgcagctggtggagtctgggggaggcttggtacagcctggcaggtccctgagactctcctgtgcagcctctggattcacctttgatgattataccatgcactgggtccggcaagttccaggaaagggcctggagtggatctcaggtattagttggaatagtggtagcatggactatgcggactctgtgaagggccgattcaccatctctagagacaacgccaggaactccctgtttctgcaaatgaacagtgtgagaactgaggacacggccttgtattactgtgcaaaagataagagtggctacggctccttctactacggtatggacgtctggggccaggggaccacggtcaccgtctcctca

SEQ ID NO: 1106 - protein, 123 aa, synthetic construct
  REGION 1..123: note = Description of Artificial Sequence: Synthetic polypeptide
EVQLVESGGGLVQPGRSLRLSCAASGFTFDDYTMHWVRQVPGKGLEWISGISWNSGSMDYADSVKGRFTISRDNARNSLFLQMNSVRTEDTALYYCAKDKSGYGSFYYGMDVWGQGTTVTVSS

SEQ ID NO: 1107 - DNA, 24 bp, synthetic construct
  misc_feature 1..24: note = Description of Artificial Sequence: Synthetic oligonucleotide
  source 1..24: mol_type = other DNA
ggattcacctttgatgattatacc

SEQ ID NO: 1108 - protein, 8 aa, synthetic construct
  REGION 1..8: note = Description of Artificial Sequence: Synthetic peptide
GFTFDDYT

SEQ ID NO: 1109 - DNA, 24 bp, synthetic construct
  misc_feature 1..24: note = Description of Artificial Sequence: Synthetic oligonucleotide
  source 1..24: mol_type = other DNA
attagttggaatagtggtagcatg

SEQ ID NO: 1110 - protein, 8 aa, synthetic construct
  REGION 1..8: note = Description of Artificial Sequence: Synthetic peptide
ISWNSGSM

SEQ ID NO: 1111 - DNA, 48 bp, synthetic construct
  misc_feature 1..48: note = Description of Artificial Sequence: Synthetic oligonucleotide
  source 1..48: mol_type = other DNA
gcaaaagataagagtggctacggctccttctactacggtatggacgtc

SEQ ID NO: 1112 - protein, 16 aa, synthetic construct
  REGION 1..16: note = Description of Artificial Sequence: Synthetic peptide
AKDKSGYGSFYYGMDV

SEQ ID NO: 1113 - DNA, 324 bp, synthetic construct
  misc_feature 1..324: note = Description of Artificial Sequence: Synthetic polynucleotide
  source 1..324: mol_type = other DNA
gaaattgtgttgacgcagtctccaggcaccctgtctttgtctccaggggacagagccaccctctcctgcagggccagtcagagtgtcagcagcatctacttagcctggtaccagcagaaacctggccaggctcccaggctcctcatccatggtgcgtccaccagggccactggcatcccagacaggttcagtggcagtgggtcagggacagacttcactctcaccatcagcagactggagcctgaagattttgcagtttattactgtcagcagcgtgctcactcaccgtacacttttggccaggggaccaagctggagatcaaa

SEQ ID NO: 1114 - protein, 108 aa, synthetic construct
  REGION 1..108: note = Description of Artificial Sequence: Synthetic polypeptide
EIVLTQSPGTLSLSPGDRATLSCRASQSVSSIYLAWYQQKPGQAPRLLIHGASTRATGIPDRFSGSGSGTDFTLTISRLEPEDFAVYYCQQRAHSPYTFGQGTKLEIK

SEQ ID NO: 1115 - DNA, 21 bp, synthetic construct
  misc_feature 1..21: note = Description of Artificial Sequence: Synthetic oligonucleotide
  source 1..21: mol_type = other DNA
cagagtgtcagcagcatctac

SEQ ID NO: 1116 - protein, 7 aa, synthetic construct
  REGION 1..7: note = Description of Artificial Sequence: Synthetic peptide
QSVSSIY

SEQ ID NO: 1117-1118 - skipped (2 entries)

SEQ ID NO: 1119 - DNA, 27 bp, synthetic construct
  misc_feature 1..27: note = Description of Artificial Sequence: Synthetic oligonucleotide
  source 1..27: mol_type = other DNA
cagcagcgtgctcactcaccgtacact

SEQ ID NO: 1120 - protein, 9 aa, synthetic construct
  REGION 1..9: note = Description of Artificial Sequence: Synthetic peptide
QQRAHSPYT

SEQ ID NO: 1121 - DNA, 369 bp, synthetic construct
  misc_feature 1..369: note = Description of Artificial Sequence: Synthetic polynucleotide
  source 1..369: mol_type = other DNA
gaagtgcagctggtggagtctgggggaggcttggtacagcctggcaggtccctgagactctcctgtgcagcctctggcttcagctttgataattatgccatgcactgggtccggcaagctccaggacagggcctggagtgggtctcaggtattagttggaatagtggtagcagagactatgcggactctgtgaagggccgattcaccatctccagagacaatgccaggaactccctgtttctgcaaatgaacagtctgagtaatgaggacacggccatgtattactgcgcaaaagataagagtggctacggctcctacttctacggtatggacgtctggggccaagggaccacggtcaccgtctcctca

SEQ ID NO: 1122 - protein, 123 aa, synthetic construct
  REGION 1..123: note = Description of Artificial Sequence: Synthetic polypeptide
EVQLVESGGGLVQPGRSLRLSCAASGFSFDNYAMHWVRQAPGQGLEWVSGISWNSGSRDYADSVKGRFTISRDNARNSLFLQMNSLSNEDTAMYYCAKDKSGYGSYFYGMDVWGQGTTVTVSS

SEQ ID NO: 1123 - DNA, 24 bp, synthetic construct
  misc_feature 1..24: note = Description of Artificial Sequence: Synthetic oligonucleotide
  source 1..24: mol_type = other DNA
ggcttcagctttgataattatgcc

SEQ ID NO: 1124 - protein, 8 aa, synthetic construct
  REGION 1..8: note = Description of Artificial Sequence: Synthetic peptide
GFSFDNYA

SEQ ID NO: 1125 - DNA, 24 bp, synthetic construct
  misc_feature 1..24: note = Description of Artificial Sequence: Synthetic oligonucleotide
  source 1..24: mol_type = other DNA
attagttggaatagtggtagcaga

SEQ ID NO: 1126 - protein, 8 aa, synthetic construct
  REGION 1..8: note = Description of Artificial Sequence: Synthetic peptide
ISWNSGSR

SEQ ID NO: 1127 - DNA, 48 bp, synthetic construct
  misc_feature 1..48: note = Description of Artificial Sequence: Synthetic oligonucleotide
  source 1..48: mol_type = other DNA
gcaaaagataagagtggctacggctcctacttctacggtatggacgtc

SEQ ID NO: 1128 - protein, 16 aa, synthetic construct
  REGION 1..16: note = Description of Artificial Sequence: Synthetic peptide
AKDKSGYGSYFYGMDV

SEQ ID NO: 1129 - DNA, 324 bp, synthetic construct
  misc_feature 1..324: note = Description of Artificial Sequence: Synthetic polynucleotide
  source 1..324: mol_type = other DNA
gaaattgtgttgacgcagtctccaggcaccctgtctttgtctccaggggacagagccaccctctcctgcagggccagtcagagtattagaaacatctatttagcctggtaccagcagaaacctggccaggctcccaggctcctcatccatggtgcgtccaccagggccactggcatcccagacaggttcagtggcagtgggtcagggacagacttcactctcaccatcagcagactggagcctgaagattttgcagtttattactgtcagcagcgtgttagtttaccgtacacttttggccaggggaccaagctggagatcaaa

SEQ ID NO: 1130 - protein, 108 aa, synthetic construct
  REGION 1..108: note = Description of Artificial Sequence: Synthetic polypeptide
EIVLTQSPGTLSLSPGDRATLSCRASQSIRNIYLAWYQQKPGQAPRLLIHGASTRATGIPDRFSGSGSGTDFTLTISRLEPEDFAVYYCQQRVSLPYTFGQGTKLEIK

SEQ ID NO: 1131 - DNA, 21 bp, synthetic construct
  misc_feature 1..21: note = Description of Artificial Sequence: Synthetic oligonucleotide
  source 1..21: mol_type = other DNA
cagagtattagaaacatctat

SEQ ID NO: 1132 - protein, 7 aa, synthetic construct
  REGION 1..7: note = Description of Artificial Sequence: Synthetic peptide
QSIRNIY

SEQ ID NO: 1133-1134 - skipped (2 entries)

SEQ ID NO: 1135 - DNA, 27 bp, synthetic construct
  misc_feature 1..27: note = Description of Artificial Sequence: Synthetic oligonucleotide
  source 1..27: mol_type = other DNA
cagcagcgtgttagtttaccgtacact

SEQ ID NO: 1136 - protein, 9 aa, synthetic construct
  REGION 1..9: note = Description of Artificial Sequence: Synthetic peptide
QQRVSLPYT

SEQ ID NO: 1137 - DNA, 369 bp, synthetic construct
  misc_feature 1..369: note = Description of Artificial Sequence: Synthetic polynucleotide
  source 1..369: mol_type = other DNA
caggtgcagctggtggagtctgggggaggcttggtacagcctggcaggtccctgagactctcctgtgcagcctctggcttcagctttgatgattatgccatgcactgggtccggcaagctccaggacagggcctggagtgggtctcaggtattagttggaatggtggtagcagagactatgcggactctgtgaagggccgattcaccatctccagagacaacgccaggaactccctgtttctgcaaatgaacagtctgtttactgaggacacggccttgtattactgtgcaaaagataagagtggctacggctcctacttctacggtatggacgtctggggccaagggaccacggtcaccgtctcctca

SEQ ID NO: 1138 - protein, 123 aa, synthetic construct
  REGION 1..123: note = Description of Artificial Sequence: Synthetic polypeptide
QVQLVESGGGLVQPGRSLRLSCAASGFSFDDYAMHWVRQAPGQGLEWVSGISWNGGSRDYADSVKGRFTISRDNARNSLFLQMNSLFTEDTALYYCAKDKSGYGSYFYGMDVWGQGTTVTVSS

SEQ ID NO: 1139 - DNA, 24 bp, synthetic construct
  misc_feature 1..24: note = Description of Artificial Sequence: Synthetic oligonucleotide
  source 1..24: mol_type = other DNA
ggcttcagctttgatgattatgcc

SEQ ID NO: 1140 - protein, 8 aa, synthetic construct
  REGION 1..8: note = Description of Artificial Sequence: Synthetic peptide
GFSFDDYA

SEQ ID NO: 1141 - DNA, 24 bp, synthetic construct
  misc_feature 1..24: note = Description of Artificial Sequence: Synthetic oligonucleotide
  source 1..24: mol_type = other DNA
attagttggaatggtggtagcaga

SEQ ID NO: 1142 - protein, 8 aa, synthetic construct
  REGION 1..8: note = Description of Artificial Sequence: Synthetic peptide
ISWNGGSR

SEQ ID NO: 1143 - DNA, 48 bp, synthetic construct; identical to SEQ ID NO: 1127
  misc_feature 1..48: note = Description of Artificial Sequence: Synthetic oligonucleotide
  source 1..48: mol_type = other DNA

SEQ ID NO: 1144 - protein, 16 aa, synthetic construct
  REGION 1..16: note = Description of Artificial Sequence: Synthetic peptide
AKDKSGYGSYFYGMDV

SEQ ID NO: 1145 - DNA, 324 bp, synthetic construct
  misc_feature 1..324: note = Description of Artificial Sequence: Synthetic polynucleotide
  source 1..324: mol_type = other DNA
gaaattgtgttgacgcagtctccaggcattctgtctttgtctccaggggacagagccaccctctcctgcagggccagtcagagtattagaaacatctatttagcctggtaccagcagaaacctggccaggctcccaggctcctcatccatggtgcgtccaccagggccactggcatcccagacaggttcagtggcagtgggtcagggacagacttcactctcaccatcagcagactggagcctgaagattttgcagtttattactgtcagcagcgtgttagttcaccgtacacttttggccaggggaccaagctggagatcaaa

SEQ ID NO: 1146 - protein, 108 aa, synthetic construct
  REGION 1..108: note = Description of Artificial Sequence: Synthetic polypeptide
EIVLTQSPGILSLSPGDRATLSCRASQSIRNIYLAWYQQKPGQAPRLLIHGASTRATGIPDRFSGSGSGTDFTLTISRLEPEDFAVYYCQQRVSSPYTFGQGTKLEIK

SEQ ID NO: 1147 - DNA, 21 bp, synthetic construct
  misc_feature 1..21: note = Description of Artificial Sequence: Synthetic oligonucleotide
  source 1..21: mol_type = other DNA
cagagtattagaaacatctat

SEQ ID NO: 1148 - protein, 7 aa, synthetic construct
  REGION 1..7: note = Description of Artificial Sequence: Synthetic peptide
QSIRNIY

SEQ ID NO: 1149-1150 - skipped (2 entries)

SEQ ID NO: 1151 - DNA, 27 bp, synthetic construct
  misc_feature 1..27: note = Description of Artificial Sequence: Synthetic oligonucleotide
  source 1..27: mol_type = other DNA
cagcagcgtgttagttcaccgtacact

SEQ ID NO: 1152 - protein, 9 aa, synthetic construct
  REGION 1..9: note = Description of Artificial Sequence: Synthetic peptide
QQRVSSPYT

SEQ ID NO: 1153 - DNA, 369 bp, synthetic construct
  misc_feature 1..369: note = Description of Artificial Sequence: Synthetic polynucleotide
  source 1..369: mol_type = other DNA
gaggtgcagctggtggagtctgggggaggcttggtacagcctggcaggtccctgagactctcctgtgcagcctctggattcacctttgatgattatgccatgcactgggtccggcaagctccaggaaagggcctggagtgggtctcaggtattagttggaatagtggtagcagagactatgcggactctgtgaagggccgattcaccatctccagagacaacgccaggaactccctgtttctgcaaatgaacagtctgagtactgaggacacggccttgtattactgtgcaaaagataagagtggctacggctcctactactacggtatggacgtctggggccaagggaccacggtcaccgtctcctca

SEQ ID NO: 1154 - protein, 123 aa, synthetic construct
  REGION 1..123: note = Description of Artificial Sequence: Synthetic polypeptide
EVQLVESGGGLVQPGRSLRLSCAASGFTFDDYAMHWVRQAPGKGLEWVSGISWNSGSRDYADSVKGRFTISRDNARNSLFLQMNSLSTEDTALYYCAKDKSGYGSYYYGMDVWGQGTTVTVSS

SEQ ID NO: 1155 - DNA, 24 bp, synthetic construct
  misc_feature 1..24: note = Description of Artificial Sequence: Synthetic oligonucleotide
  source 1..24: mol_type = other DNA
ggattcacctttgatgattatgcc

SEQ ID NO: 1156 - protein, 8 aa, synthetic construct
  REGION 1..8: note = Description of Artificial Sequence: Synthetic peptide
GFTFDDYA

SEQ ID NO: 1157 - DNA, 24 bp, synthetic construct
  misc_feature 1..24: note = Description of Artificial Sequence: Synthetic oligonucleotide
  source 1..24: mol_type = other DNA
attagttggaatagtggtagcaga

SEQ ID NO: 1158 - protein, 8 aa, synthetic construct
  REGION 1..8: note = Description of Artificial Sequence: Synthetic peptide
ISWNSGSR

SEQ ID NO: 1159 - DNA, 48 bp, synthetic construct
  misc_feature 1..48: note = Description of Artificial Sequence: Synthetic oligonucleotide
  source 1..48: mol_type = other DNA
gcaaaagataagagtggctacggctcctactactacggtatggacgtc

SEQ ID NO: 1160 - protein, 16 aa, synthetic construct
  REGION 1..16: note = Description of Artificial Sequence: Synthetic peptide
AKDKSGYGSYYYGMDV

SEQ ID NO: 1161 - DNA, 324 bp, synthetic construct
  misc_feature 1..324: note = Description of Artificial Sequence: Synthetic polynucleotide
  source 1..324: mol_type = other DNA
gaaattgtgttgacgcagtctccaggcaccctgtctttgtctccaggggacagagccaccctctcctgcagggccagtcagagtattagaagcatctacttagcctggtaccagcagaaacctggccaggctcccaggctcctcatccatggtgcgtccaccagggccactggcatcccagacaggttcagtggcagtgggtcagggacagacttcactctcaccatcagcagactggagcctgaagattttgcagtttattactgtcagcagcgtgttagctcaccgtacacttttggccaggggaccaagctggagatcaaa

SEQ ID NO: 1162 - protein, 108 aa, synthetic construct
  REGION 1..108: note = Description of Artificial Sequence: Synthetic polypeptide
EIVLTQSPGTLSLSPGDRATLSCRASQSIRSIYLAWYQQKPGQAPRLLIHGASTRATGIPDRFSGSGSGTDFTLTISRLEPEDFAVYYCQQRVSSPYTFGQGTKLEIK

SEQ ID NO: 1163 - DNA, 21 bp, synthetic construct
  misc_feature 1..21: note = Description of Artificial Sequence: Synthetic oligonucleotide
  source 1..21: mol_type = other DNA
cagagtattagaagcatctac

SEQ ID NO: 1164 - protein, 7 aa, synthetic construct
  REGION 1..7: note = Description of Artificial Sequence: Synthetic peptide
QSIRSIY

SEQ ID NO: 1165-1166 - skipped (2 entries)

SEQ ID NO: 1167 - DNA, 27 bp, synthetic construct
  misc_feature 1..27: note = Description of Artificial Sequence: Synthetic oligonucleotide
  source 1..27: mol_type = other DNA
cagcagcgtgttagctcaccgtacact

SEQ ID NO: 1168 - protein, 9 aa, synthetic construct
  REGION 1..9: note = Description of Artificial Sequence: Synthetic peptide
QQRVSSPYT

SEQ ID NO: 1169 - DNA, 369 bp, synthetic construct
  misc_feature 1..369: note = Description of Artificial Sequence: Synthetic polynucleotide
  source 1..369: mol_type = other DNA
gaagtgcagctggtggagtctgggggaggcttggtacagcctggcaggtccctgagactctcctgtgtagcctctggattcacctttgctgattttaccatgcactgggtccggcaagcgccagggaagggccttgagtgggtctcaggtattagttggaatagtaatagtatagactatgcggactctgtgaagggccgattcaccatctccagagacaacgccaagaaatccctgtttctgcaaatgtccagtctgagagctgaggacacggccttatattactgtgtcaaagacagaagcggatatagcagattctactacggtatggacgtctggggccaagggaccacggtcaccgtctcctca

SEQ ID NO: 1170 - protein, 123 aa, synthetic construct
  REGION 1..123: note = Description of Artificial Sequence: Synthetic polypeptide
EVQLVESGGGLVQPGRSLRLSCVASGFTFADFTMHWVRQAPGKGLEWVSGISWNSNSIDYADSVKGRFTISRDNAKKSLFLQMSSLRAEDTALYYCVKDRSGYSRFYYGMDVWGQGTTVTVSS

SEQ ID NO: 1171 - DNA, 24 bp, synthetic construct
  misc_feature 1..24: note = Description of Artificial Sequence: Synthetic oligonucleotide
  source 1..24: mol_type = other DNA
ggattcacctttgctgattttacc

SEQ ID NO: 1172 - protein, 8 aa, synthetic construct
  REGION 1..8: note = Description of Artificial Sequence: Synthetic peptide
GFTFADFT

SEQ ID NO: 1173 - DNA, 24 bp, synthetic construct
  misc_feature 1..24: note = Description of Artificial Sequence: Synthetic oligonucleotide
  source 1..24: mol_type = other DNA
attagttggaatagtaatagtata

SEQ ID NO: 1174 - protein, 8 aa, synthetic construct
  REGION 1..8: note = Description of Artificial Sequence: Synthetic peptide
ISWNSNSI

SEQ ID NO: 1175 - DNA, 48 bp, synthetic construct
  misc_feature 1..48: note = Description of Artificial Sequence: Synthetic oligonucleotide
  source 1..48: mol_type = other DNA
gtcaaagacagaagcggatatagcagattctactacggtatggacgtc

SEQ ID NO: 1176 - protein, 16 aa, synthetic construct
  REGION 1..16: note = Description of Artificial Sequence: Synthetic peptide
VKDRSGYSRFYYGMDV

SEQ ID NO: 1177 - DNA, 321 bp, synthetic construct
  misc_feature 1..321: note = Description of Artificial Sequence: Synthetic polynucleotide
  source 1..321: mol_type = other DNA
gaaattgtgatgacgcagtctccagccaccctgtctgtgtctccaggggaaagagccatcctctcctgcagggccagtcagaatattaatagcaacttggcctggtaccagcagaaacctggccaggctcccaggctcctcatctatggtgcatccaccagggccactggtgtcccagccaggttcagtggcagtgggtctgggacagagttcactctcaccatccgcagcctgcaatctgaagattttgcagtttattactgtcaacaatattataattggccgatcactttcggccacgggacacgactggagattaaa

SEQ ID NO: 1178 - protein, 107 aa, synthetic construct
  REGION 1..107: note = Description of Artificial Sequence: Synthetic polypeptide
EIVMTQSPATLSVSPGERAILSCRASQNINSNLAWYQQKPGQAPRLLIYGASTRATGVPARFSGSGSGTEFTLTIRSLQSEDFAVYYCQQYYNWPITFGHGTRLEIK

SEQ ID NO: 1179 - DNA, 18 bp, synthetic construct
  misc_feature 1..18: note = Description of Artificial Sequence: Synthetic oligonucleotide
  source 1..18: mol_type = other DNA
cagaatattaatagcaac

SEQ ID NO: 1180 - protein, 6 aa, synthetic construct
  REGION 1..6: note = Description of Artificial Sequence: Synthetic peptide
QNINSN

SEQ ID NO: 1181-1182 - skipped (2 entries)

SEQ ID NO: 1183 - DNA, 27 bp, synthetic construct
  misc_feature 1..27: note = Description of Artificial Sequence: Synthetic oligonucleotide
  source 1..27: mol_type = other DNA
caacaatattataattggccgatcact

SEQ ID NO: 1184 - protein, 9 aa, synthetic construct
  REGION 1..9: note = Description of Artificial Sequence: Synthetic peptide
QQYYNWPIT

SEQ ID NO: 1185 - DNA, 369 bp, synthetic construct
  misc_feature 1..369: note = Description of Artificial Sequence: Synthetic polynucleotide
  source 1..369: mol_type = other DNA
gaggtgcagctggtggagtctgggggaggcttggtacagcctggcaggtccctgagactctcctgtgcagcctctggattcacctttgatgattatgccatgcactgggtccggcaagctccaggaaagggcctggagtgggtctcaggtattagttggaatggtggtagtaaagactatgcggactctgtgaagggccgattcaccatctccagagacaacaccaggaactccctgtctctgcaaatgaacagtctgagaattgaagacacggccttatattactgtgcaaaagataagagtggctacggctccttctactacggtttggacgtctggggccaagggaccacggtcaccgtctcctca

SEQ ID NO: 1186 - protein, 123 aa, synthetic construct
  REGION 1..123: note = Description of Artificial Sequence: Synthetic polypeptide
EVQLVESGGGLVQPGRSLRLSCAASGFTFDDYAMHWVRQAPGKGLEWVSGISWNGGSKDYADSVKGRFTISRDNTRNSLSLQMNSLRIEDTALYYCAKDKSGYGSFYYGLDVWGQGTTVTVSS

SEQ ID NO: 1187 - DNA, 24 bp, synthetic construct
  misc_feature 1..24: note = Description of Artificial Sequence: Synthetic oligonucleotide
  source 1..24: mol_type = other DNA
ggattcacctttgatgattatgcc

SEQ ID NO: 1188 - protein, 8 aa, synthetic construct
  REGION 1..8: note = Description of Artificial Sequence: Synthetic peptide
GFTFDDYA

SEQ ID NO: 1189 - DNA, 24 bp, synthetic construct
  misc_feature 1..24: note = Description of Artificial Sequence: Synthetic oligonucleotide
  source 1..24: mol_type = other DNA
attagttggaatggtggtagtaaa

SEQ ID NO: 1190 - protein, 8 aa, synthetic construct
  REGION 1..8: note = Description of Artificial Sequence: Synthetic peptide
ISWNGGSK

SEQ ID NO: 1191 - DNA, 48 bp, synthetic construct
  misc_feature 1..48: note = Description of Artificial Sequence: Synthetic oligonucleotide
  source 1..48: mol_type = other DNA
gcaaaagataagagtggctacggctccttctactacggtttggacgtc

SEQ ID NO: 1192 - protein, 16 aa, synthetic construct
  REGION 1..16: note = Description of Artificial Sequence: Synthetic peptide
AKDKSGYGSFYYGLDV

SEQ ID NO: 1193 - DNA, 324 bp, synthetic construct
  misc_feature 1..324: note = Description of Artificial Sequence: Synthetic polynucleotide
  source 1..324: mol_type = other DNA
gaaatagtgttgacacagtctccaggcaccctgtctttgtctccaggggacagagccaccctctcctgcagggccagtcagagtattagaagcatctacttagcctggtaccagcagaaacctggccaggctcccaggctcctcatccatggtgcgtccaccagggccactggcatcccagacaggttcagtggcagtgggtcagggacagacttcactctcaccatcagcagactggagcctgaagattttgcagtttattactgtcagcagcgtgttagctcaccgtacacttttggccaggggaccaagctggagatcaaa

SEQ ID NO: 1194 - protein, 108 aa, synthetic construct; identical to SEQ ID NO: 1162
  REGION 1..108: note = Description of Artificial Sequence: Synthetic polypeptide

SEQ ID NO: 1195 - DNA, 21 bp, synthetic construct
  misc_feature 1..21: note = Description of Artificial Sequence: Synthetic oligonucleotide
  source 1..21: mol_type = other DNA
cagagtattagaagcatctac

SEQ ID NO: 1196 - protein, 7 aa, synthetic construct
  REGION 1..7: note = Description of Artificial Sequence: Synthetic peptide
QSIRSIY

SEQ ID NO: 1197-1198 - skipped (2 entries)

SEQ ID NO: 1199 - DNA, 27 bp, synthetic construct
  misc_feature 1..27: note = Description of Artificial Sequence: Synthetic oligonucleotide
  source 1..27: mol_type = other DNA
cagcagcgtgttagctcaccgtacact

SEQ ID NO: 1200 - protein, 9 aa, synthetic construct
  REGION 1..9: note = Description of Artificial Sequence: Synthetic peptide
QQRVSSPYT

SEQ ID NO: 1201 - DNA, 369 bp, synthetic construct
  misc_feature 1..369: note = Description of Artificial Sequence: Synthetic polynucleotide
  source 1..369: mol_type = other DNA
gaggtgcagctggtggagtctgggggaggcttggtacagcctggcaggtccctgagactctcctgtgcagcctctggattcacctttgatgatttcaccatgcactgggtccggcaagctccaggaaagggcctggagtgggtctcagatattagttggaatagtggtagcatagactatgcggactctgtgaagggccgattcaccatttccagagacaatgccaggaactccctgtttctacaaatgagcagtctgagaactgaggacacggcctcgtattactgtataaaagataagagtggctacggctcctacaactacggtctggacgtctggggccaagggaccacggtcaccgtctcctca

SEQ ID NO: 1202 - protein, 123 aa, synthetic construct
  REGION 1..123: note = Description of Artificial Sequence: Synthetic polypeptide
EVQLVESGGGLVQPGRSLRLSCAASGFTFDDFTMHWVRQAPGKGLEWVSDISWNSGSIDYADSVKGRFTISRDNARNSLFLQMSSLRTEDTASYYCIKDKSGYGSYNYGLDVWGQGTTVTVSS

SEQ ID NO: 1203 - DNA, 24 bp, synthetic construct
  misc_feature 1..24: note = Description of Artificial Sequence: Synthetic oligonucleotide
  source 1..24: mol_type = other DNA
ggattcacctttgatgatttcacc

SEQ ID NO: 1204 - protein, 8 aa, synthetic construct
  REGION 1..8: note = Description of Artificial Sequence: Synthetic peptide
GFTFDDFT

SEQ ID NO: 1205 - DNA, 24 bp, synthetic construct
  misc_feature 1..24: note = Description of Artificial Sequence: Synthetic oligonucleotide
  source 1..24: mol_type = other DNA
attagttggaatagtggtagcata

SEQ ID NO: 1206 - protein, 8 aa, synthetic construct
  REGION 1..8: note = Description of Artificial Sequence: Synthetic peptide
ISWNSGSI

SEQ ID NO: 1207 - DNA, 48 bp, synthetic construct
  misc_feature 1..48: note = Description of Artificial Sequence: Synthetic oligonucleotide
  source 1..48: mol_type = other DNA
ataaaagataagagtggctacggctcctacaactacggtctggacgtc

SEQ ID NO: 1208 - protein, 16 aa, synthetic construct
  REGION 1..16: note = Description of Artificial Sequence: Synthetic peptide
IKDKSGYGSYNYGLDV

SEQ ID NO: 1209 - DNA, 324 bp, synthetic construct
  misc_feature 1..324: note = Description of Artificial Sequence: Synthetic polynucleotide
  source 1..324: mol_type = other DNA
gaaattgtgttgacgcagtctccaggcaccctgtctttgtctccaggggacagagccaccctctcctgcagggccagtcagagtgttagcagcatctacttagcctggtaccagcagaaacctggccaggctcccaggctcctcatccatggtgcgtccaccagggccactggcatcccagacaggttcagtggcagtgggtcggggacagacttcactctcaccatcagcagactggagcctgaagattttgcactttattactgtcaccagcgtgttagttcaccgtacacttttggccaggggaccaagctggagatcaaa

SEQ ID NO: 1210 - protein, 108 aa, synthetic construct
  REGION 1..108: note = Description of Artificial Sequence: Synthetic polypeptide
EIVLTQSPGTLSLSPGDRATLSCRASQSVSSIYLAWYQQKPGQAPRLLIHGASTRATGIPDRFSGSGSGTDFTLTISRLEPEDFALYYCHQRVSSPYTFGQGTKLEIK

SEQ ID NO: 1211 - DNA, 21 bp, synthetic construct
  misc_feature 1..21: note = Description of Artificial Sequence: Synthetic oligonucleotide
  source 1..21: mol_type = other DNA
cagagtgttagcagcatctac

SEQ ID NO: 1212 - protein, 7 aa, synthetic construct
  REGION 1..7: note = Description of Artificial Sequence: Synthetic peptide
QSVSSIY

SEQ ID NO: 1213-1214 - skipped (2 entries)

SEQ ID NO: 1215 - DNA, 27 bp, synthetic construct
  misc_feature 1..27: note = Description of Artificial Sequence: Synthetic oligonucleotide
  source 1..27: mol_type = other DNA
caccagcgtgttagttcaccgtacact

SEQ ID NO: 1216 - protein, 9 aa, synthetic construct
  REGION 1..9: note = Description of Artificial Sequence: Synthetic peptide
HQRVSSPYT

SEQ ID NO: 1217 - DNA, 369 bp, synthetic construct
  misc_feature 1..369: note = Description of Artificial Sequence: Synthetic polynucleotide
  source 1..369: mol_type = other DNA
gaggtgcagctggtggagtctgggggaggcttggtacagcctggcaggtccctgagactctcctgtgcagcctctggattcacctttgatgattatgccatgcactgggtccggcaagctccaggaaagggcctggagtgggtctcaggtattagttggaatagtggtagtaaagactatgcggactctgtgaagggccgattcaccatctccagagacaacaccaggaactccctgtttctgcaaatgaacagtctgagaactgaagacacggccttatattactgtgcaaaagataagagtggctacggctccttctactacggtatggacgtctggggccaagggaccacggtcaccgtctcctca

SEQ ID NO: 1218 - protein, 123 aa, synthetic construct
  REGION 1..123: note = Description of Artificial Sequence: Synthetic polypeptide
EVQLVESGGGLVQPGRSLRLSCAASGFTFDDYAMHWVRQAPGKGLEWVSGISWNSGSKDYADSVKGRFTISRDNTRNSLFLQMNSLRTEDTALYYCAKDKSGYGSFYYGMDVWGQGTTVTVSS

SEQ ID NO: 1219 - DNA, 24 bp, synthetic construct
  misc_feature 1..24: note = Description of Artificial Sequence: Synthetic oligonucleotide
  source 1..24: mol_type = other DNA
ggattcacctttgatgattatgcc

SEQ ID NO: 1220 - protein, 8 aa, synthetic construct
  REGION 1..8: note = Description of Artificial Sequence: Synthetic peptide
GFTFDDYA

SEQ ID NO: 1221 - DNA, 24 bp, synthetic construct
  misc_feature 1..24: note = Description of Artificial Sequence: Synthetic oligonucleotide
  source 1..24: mol_type = other DNA
attagttggaatagtggtagtaaa

SEQ ID NO: 1222 - protein, 8 aa, synthetic construct
  REGION 1..8: note = Description of Artificial Sequence: Synthetic peptide
ISWNSGSK

SEQ ID NO: 1223 - DNA, 48 bp, synthetic construct; identical to SEQ ID NO: 1111
  misc_feature 1..48: note = Description of Artificial Sequence: Synthetic oligonucleotide
  source 1..48: mol_type = other DNA

SEQ ID NO: 1224 - protein, 16 aa, synthetic construct
  REGION 1..16: note = Description of Artificial Sequence: Synthetic peptide
AKDKSGYGSFYYGMDV

SEQ ID NO: 1225 - DNA, 318 bp, synthetic construct
  misc_feature 1..318: note = Description of Artificial Sequence: Synthetic polynucleotide
  source 1..318: mol_type = other DNA
gacatccagatgacccagtctccttccaccctgtctgcatctgtaggagacagagtcaccatcacttgccgggccagtcagagtattagtagctggttggcctggtatcagcagaaaccagggaaagcccctaagctcctgatctataaggcgtctagtttagaaagtggggtcccatcaaggttcagcggcagtggatctgggacagaattcactctcaccatcagcagcctgcagcctgatgattttgcaacttattactgccaacagtataatagttattctccgttcggccaagggaccaaggtggaaatcaaa

SEQ ID NO: 1226 - protein, 106 aa, synthetic construct
  REGION 1..106: note = Description of Artificial Sequence: Synthetic polypeptide
DIQMTQSPSTLSASVGDRVTITCRASQSISSWLAWYQQKPGKAPKLLIYKASSLESGVPSRFSGSGSGTEFTLTISSLQPDDFATYYCQQYNSYSPFGQGTKVEIK

SEQ ID NO: 1227 - DNA, 18 bp, synthetic construct
  misc_feature 1..18: note = Description of Artificial Sequence: Synthetic oligonucleotide
  source 1..18: mol_type = other DNA
cagagtattagtagctgg

SEQ ID NO: 1228 - protein, 6 aa, synthetic construct
  REGION 1..6: note = Description of Artificial Sequence: Synthetic peptide
QSISSW

SEQ ID NO: 1229-1230 - skipped (2 entries)

SEQ ID NO: 1231 - DNA, 24 bp, synthetic construct
  misc_feature 1..24: note = Description of Artificial Sequence: Synthetic oligonucleotide
  source 1..24: mol_type = other DNA
caacagtataatagttattctccg

SEQ ID NO: 1232 - protein, 8 aa, synthetic construct
  REGION 1..8: note = Description of Artificial Sequence: Synthetic peptide
QQYNSYSP

SEQ ID NO: 1233 - DNA, 372 bp, synthetic construct
  misc_feature 1..372: note = Description of Artificial Sequence: Synthetic polynucleotide
  source 1..372: mol_type = other DNA
caggtgcaactggtggagtctgggggaggcgtggtccagcctgggaggtccctgagactctcctgtgcagcctctggactcaccttcagtacctatgtcatgcactgggtccgccaggctccaggcaaggggctggcgtgggtggcagttatagcaaatgatggaagtaataaatattatgcagactccgtgaagggccgattcaccatctccagagacaactccaagaacacgctgtatctgcaaatgaatagcctgagacctgaggacacggctgtgtatttttgtgcgaaagaggggggtaccagtgggtcctactattactatggaatggacgtctggggtcaagggactacggtcaccgtctcctca

SEQ ID NO: 1234 - protein, 124 aa, synthetic construct
  REGION 1..124: note = Description of Artificial Sequence: Synthetic polypeptide
QVQLVESGGGVVQPGRSLRLSCAASGLTFSTYVMHWVRQAPGKGLAWVAVIANDGSNKYYADSVKGRFTISRDNSKNTLYLQMNSLRPEDTAVYFCAKEGGTSGSYYYYGMDVWGQGTTVTVSS

SEQ ID NO: 1235 - DNA, 24 bp, synthetic construct
  misc_feature 1..24: note = Description of Artificial Sequence: Synthetic oligonucleotide
  source 1..24: mol_type = other DNA
ggactcaccttcagtacctatgtc

SEQ ID NO: 1236 - protein, 8 aa, synthetic construct
  REGION 1..8: note = Description of Artificial Sequence: Synthetic peptide
GLTFSTYV

SEQ ID NO: 1237 - DNA, 24 bp, synthetic construct
  misc_feature 1..24: note = Description of Artificial Sequence: Synthetic oligonucleotide
  source 1..24: mol_type = other DNA
atagcaaatgatggaagtaataaa

SEQ ID NO: 1238 - protein, 8 aa, synthetic construct
  REGION 1..8: note = Description of Artificial Sequence: Synthetic peptide
IANDGSNK

SEQ ID NO: 1239 - DNA, 51 bp, synthetic construct
  misc_feature 1..51: note = Description of Artificial Sequence: Synthetic oligonucleotide
  source 1..51: mol_type = other DNA
gcgaaagaggggggtaccagtgggtcctactattactatggaatggacgtc

SEQ ID NO: 1240 - protein, 17 aa, synthetic construct
  REGION 1..17: note = Description of Artificial Sequence: Synthetic peptide
AKEGGTSGSYYYYGMDV

SEQ ID NO: 1241 - DNA, 342 bp, synthetic construct
  misc_feature 1..342: note = Description of Artificial Sequence: Synthetic polynucleotide
  source 1..342: mol_type = other DNA
gacatccagatgacccagtctccagactccctggctgtgtctctgggcgagagggccaccatcaactgcaagtccagccagagtcttttattcaactccatcaataagaactacttagcttggtaccagcagaaaccaggacagcctcctaagcttctcctttactgggcatctacccgggaatccgggatccctgaccgattcagtggcagcgggtctgggacagatttcactctcaccatcaccagcctgcaggctgaagatgtggcactttattactgtcagcaatattatagtattccgtggacgttcggccaagggaccaaggtggaaatcaaacga

SEQ ID NO: 1242 - protein, 114 aa, synthetic construct
  REGION 1..114: note = Description of Artificial Sequence: Synthetic polypeptide
DIQMTQSPDSLAVSLGERATINCKSSQSLLFNSINKNYLAWYQQKPGQPPKLLLYWASTRESGIPDRFSGSGSGTDFTLTITSLQAEDVALYYCQQYYSIPWTFGQGTKVEIKR

SEQ ID NO: 1243 - DNA, 36 bp, synthetic construct
  misc_feature 1..36: note = Description of Artificial Sequence: Synthetic oligonucleotide
  source 1..36: mol_type = other DNA
cagagtcttttattcaactccatcaataagaactac

SEQ ID NO: 1244 - protein, 12 aa, synthetic construct
  REGION 1..12: note = Description of Artificial Sequence: Synthetic peptide
QSLLFNSINKNY

SEQ ID NO: 1245-1246 - skipped (2 entries)

SEQ ID NO: 1247 - DNA, 27 bp, synthetic construct
  misc_feature 1..27: note = Description of Artificial Sequence: Synthetic oligonucleotide
  source 1..27: mol_type = other DNA
cagcaatattatagtattccgtggacg

SEQ ID NO: 1248 - protein, 9 aa, synthetic construct
  REGION 1..9: note = Description of Artificial Sequence: Synthetic peptide
QQYYSIPWT

SEQ ID NO: 1249 - DNA, 354 bp, synthetic construct
  misc_feature 1..354: note = Description of Artificial Sequence: Synthetic polynucleotide
  source 1..354: mol_type = other DNA
caggtgcagctggtggagtctggggctgaagtgaagaagcctggggcctcagtgaaggtctcctgcaagacttctggatacaccttcaccggctactatatgcactggatacgacaggcccctggacaagggcttgagtggatgggatggatcaaccctaaaagtggtggcacaaattatgcacagaagtttcagggcagggtcaccatgaccagggacacgtccatcagcacagcctacatggaactgagcaggctgagatccgacgacatggccgtgtattattgtgcgagaatgggggacggtgcagtgtttgacttctggggccagggaaccctggtcaccgtctcctca

SEQ ID NO: 1250 - protein, 118 aa, synthetic construct
  REGION 1..118: note = Description of Artificial Sequence: Synthetic polypeptide
QVQLVESGAEVKKPGASVKVSCKTSGYTFTGYYMHWIRQAPGQGLEWMGWINPKSGGTNYAQKFQGRVTMTRDTSISTAYMELSRLRSDDMAVYYCARMGDGAVFDFWGQGTLVTVSS

SEQ ID NO: 1251 - DNA, 24 bp, synthetic construct
  misc_feature 1..24: note = Description of Artificial Sequence: Synthetic oligonucleotide
  source 1..24: mol_type = other DNA
ggatacaccttcaccggctactat

SEQ ID NO: 1252 - protein, 8 aa, synthetic construct
  REGION 1..8: note = Description of Artificial Sequence: Synthetic peptide
GYTFTGYY

SEQ ID NO: 1253 - DNA, 24 bp, synthetic construct
  misc_feature 1..24: note = Description of Artificial Sequence: Synthetic oligonucleotide
  source 1..24: mol_type = other DNA
atcaaccctaaaagtggtggcaca

SEQ ID NO: 1254 - protein, 8 aa, synthetic construct
  REGION 1..8: note = Description of Artificial Sequence: Synthetic peptide
INPKSGGT

SEQ ID NO: 1255 - DNA, 33 bp, synthetic construct
  misc_feature 1..33: note = Description of Artificial Sequence: Synthetic oligonucleotide
  source 1..33: mol_type = other DNA
gcgagaatgggggacggtgcagtgtttgacttc

SEQ ID NO: 1256 - protein, 11 aa, synthetic construct
  REGION 1..11: note = Description of Artificial Sequence: Synthetic peptide
ARMGDGAVFDF

SEQ ID NO: 1257 - DNA, 324 bp, synthetic construct
  misc_feature 1..324: note = Description of Artificial Sequence: Synthetic polynucleotide
  source 1..324: mol_type = other DNA
gccatccagatgacccagtctccatcctccctgtctgcatctgtaggagacagagtcaccatcacttgccgggcaagtcagaggattagcagctttttaaattggtatcagcagaaaccagggaaagcccctaagctcctgatctatactgcatccaatttacaaaatggggtcccatcaaggttcagtggcagtggatctgggacagatttcactctcactatcagcagtctgcaacctgaagattttgctacttactactgtcaacagagttacaggaccccgctcactttcggcggagggaccaaggtggaaatcaaacga

SEQ ID NO: 1258 - protein, 108 aa, synthetic construct
  REGION 1..108: note = Description of Artificial Sequence: Synthetic polypeptide
AIQMTQSPSSLSASVGDRVTITCRASQRISSFLNWYQQKPGKAPKLLIYTASNLQNGVPSRFSGSGSGTDFTLTISSLQPEDFATYYCQQSYRTPLTFGGGTKVEIKR

SEQ ID NO: 1259 - DNA, 18 bp, synthetic construct
  misc_feature 1..18: note = Description of Artificial Sequence: Synthetic oligonucleotide
  source 1..18: mol_type = other DNA
cagaggattagcagcttt

SEQ ID NO: 1260 - protein, 6 aa, synthetic construct
  REGION 1..6: note = Description of Artificial Sequence: Synthetic peptide
QRISSF

SEQ ID NO: 1261-1262 - skipped (2 entries)

SEQ ID NO: 1263 - DNA, 27 bp, synthetic construct
  misc_feature 1..27: note = Description of Artificial Sequence: Synthetic oligonucleotide
  source 1..27: mol_type = other DNA
caacagagttacaggaccccgctcact

SEQ ID NO: 1264 - protein, 9 aa, synthetic construct
  REGION 1..9: note = Description of Artificial Sequence: Synthetic peptide
QQSYRTPLT

SEQ ID NO: 1265 - DNA, 369 bp, synthetic construct
  misc_feature 1..369: note = Description of Artificial Sequence: Synthetic polynucleotide
  source 1..369: mol_type = other DNA
gaggtgcagctggtggagtctgggggaggcttggtacagcctggcaggtccctgagactctcctgtgcagcctctggattcacctttgatgattataccatgcactgggtccggcaagctccagggaagggcctggagtgggtctcaggtattagttggaacagtggtagcataggctatgcggactctgtgaagggccgattcaccatttccagagacaacgccaagaactccctgtatttgcaaatgaacagtctgagagctgaggacacggccttgttttactgtgcaaaagatcaaagtggttacggccactactactacggtatggacgtctggggccaagggaccacggtcaccgtctcctca

SEQ ID NO: 1266 - protein, 123 aa, synthetic construct
  REGION 1..123: note = Description of Artificial Sequence: Synthetic polypeptide
EVQLVESGGGLVQPGRSLRLSCAASGFTFDDYTMHWVRQAPGKGLEWVSGISWNSGSIGYADSVKGRFTISRDNAKNSLYLQMNSLRAEDTALFYCAKDQSGYGHYYYGMDVWGQGTTVTVSS

SEQ ID NO: 1267 - DNA, 24 bp, synthetic construct
  misc_feature 1..24: note = Description of Artificial Sequence: Synthetic oligonucleotide
  source 1..24: mol_type = other DNA
ggattcacctttgatgattatacc

SEQ ID NO: 1268 - protein, 8 aa, synthetic construct
  REGION 1..8: note = Description of Artificial Sequence: Synthetic peptide
GFTFDDYT

SEQ ID NO: 1269 - DNA, 24 bp, synthetic construct
  misc_feature 1..24: note = Description of Artificial Sequence: Synthetic oligonucleotide
  source 1..24: mol_type = other DNA
attagttggaacagtggtagcata

SEQ ID NO: 1270 - protein, 8 aa, synthetic construct
  REGION 1..8: note = Description of Artificial Sequence: Synthetic peptide
ISWNSGSI

SEQ ID NO: 1271 - DNA, 48 bp, synthetic construct
  misc_feature 1..48: note = Description of Artificial Sequence: Synthetic oligonucleotide
  source 1..48: mol_type = other DNA
gcaaaagatcaaagtggttacggccactactactacggtatggacgtc

SEQ ID NO: 1272 - protein, 16 aa, synthetic construct
  REGION 1..16: note = Description of Artificial Sequence: Synthetic peptide
AKDQSGYGHYYYGMDV

SEQ ID NO: 1273 - DNA, 321 bp, synthetic construct
  misc_feature 1..321: note = Description of Artificial Sequence: Synthetic polynucleotide
  source 1..321: mol_type = other DNA
gaaatagtgatgacgcagtctccagccaccctgtctgtgtctccaggggaaagagccaccctctcctgtagggccagtcagagtgttagcagcaacttagcctggtaccagcagaaacctggccaggctcccaggctcctcatctatggtgcatccaccagggccactgatatcccagccaggttcagtggcagtgggtctgggacagagttcactctcaccatcagcagcctgcagtctgaagattttgcagtttatcactgtcagcagtataataactggccgctcactttcggcggagggaccaaggtggagatcaaa

SEQ ID NO: 1274 - protein, 107 aa, synthetic construct
  REGION 1..107: note = Description of Artificial Sequence: Synthetic polypeptide
EIVMTQSPATLSVSPGERATLSCRASQSVSSNLAWYQQKPGQAPRLLIYGASTRATDIPARFSGSGSGTEFTLTISSLQSEDFAVYHCQQYNNWPLTFGGGTKVEIK

SEQ ID NO: 1275 - DNA, 18 bp, synthetic construct
  misc_feature 1..18: note = Description of Artificial Sequence: Synthetic oligonucleotide
  source 1..18: mol_type = other DNA
cagagtgttagcagcaac

SEQ ID NO: 1276 - protein, 6 aa, synthetic construct
  REGION 1..6: note = Description of Artificial Sequence: Synthetic peptide
QSVSSN

SEQ ID NO: 1277-1278 - skipped (2 entries)

SEQ ID NO: 1279 - DNA, 27 bp, synthetic construct
  misc_feature 1..27: note = Description of Artificial Sequence: Synthetic oligonucleotide
  source 1..27: mol_type = other DNA
cagcagtataataactggccgctcact

SEQ ID NO: 1280 - protein, 9 aa, synthetic construct
  REGION 1..9: note = Description of Artificial Sequence: Synthetic peptide
QQYNNWPLT

SEQ ID NO: 1281 - DNA, 387 bp, synthetic construct
  misc_feature 1..387: note = Description of Artificial Sequence: Synthetic polynucleotide
  source 1..387: mol_type = other DNA
gaggtgcagctggtggagtctgggggaggcgtggtccagcctgggaggtccctgagactctcctgtgcagcctctggattcaccttcagttactatggcatgcactgggtccgccaggctccaggcaaggggctggagtgggtggcagttatatcatttgatggaaagaataaatattatgcagactccgtgatgggccgattcaccatctccagagacaattccaagaatacactgtatctgcaaatgaacagcctgagagctgaggactcggctgtgtttttctgtgcgaggtcttacgacattttgactggttatggagccggttacagctaccactacggtatggacgtctggggccaagggaccacggtcaccgtctcctca

SEQ ID NO: 1282 - protein, 129 aa, synthetic construct
  REGION 1..129: note = Description of Artificial Sequence: Synthetic polypeptide
EVQLVESGGGVVQPGRSLRLSCAASGFTFSYYGMHWVRQAPGKGLEWVAVISFDGKNKYYADSVMGRFTISRDNSKNTLYLQMNSLRAEDSAVFFCARSYDILTGYGAGYSYHYGMDVWGQGTTVTVSS

SEQ ID NO: 1283 - DNA, 24 bp, synthetic construct
  misc_feature 1..24: note = Description of Artificial Sequence: Synthetic oligonucleotide
  source 1..24: mol_type = other DNA
ggattcaccttcagttactatggc

SEQ ID NO: 1284 - protein, 8 aa, synthetic construct
  REGION 1..8: note = Description of Artificial Sequence: Synthetic peptide
GFTFSYYG

SEQ ID NO: 1285 - DNA, 24 bp, synthetic construct
  misc_feature 1..24: note = Description of Artificial Sequence: Synthetic oligonucleotide
  source 1..24: mol_type = other DNA
atatcatttgatggaaagaataaa

SEQ ID NO: 1286 - protein, 8 aa, synthetic construct
  REGION 1..8: note = Description of Artificial Sequence: Synthetic peptide
ISFDGKNK

SEQ ID NO: 1287 - DNA, 66 bp, synthetic construct
  misc_feature 1..66: note = Description of Artificial Sequence: Synthetic oligonucleotide
  source 1..66: mol_type = other DNA
gcgaggtcttacgacattttgactggttatggagccggttacagctaccactacggtatggacgtc

SEQ ID NO: 1288 - protein, 22 aa, synthetic construct
  REGION 1..22: note = Description of Artificial Sequence: Synthetic peptide
ARSYDILTGYGAGYSYHYGMDV

SEQ ID NO: 1289 - DNA, 324 bp, synthetic construct
  misc_feature 1..324: note = Description of Artificial Sequence: Synthetic polynucleotide
  source 1..324: mol_type = other DNA
gccatccagatgacccagtctccatcctccctgtctgcatctgtaggagacagagtcaccatcacttgccgggcaagtcagaggattagcagctttttaaattggtatcagcagaaaccagggaaagcccctaagctcctaatctatactgcatccaatttacaaaatggggtcccatcaaggttcagtggcagtggatctgggacagatttcactctcaccatcagcagtctgcaacctgaagattttgcaacttactactgtcaacagagttacaggaccccgctcactttcggcggagggaccaaggtggagatcaaacga

SEQ ID NO: 1290 - protein, 108 aa, synthetic construct; identical to SEQ ID NO: 1258
  REGION 1..108: note = Description of Artificial Sequence: Synthetic polypeptide

SEQ ID NO: 1291 - DNA, 18 bp, synthetic construct
  misc_feature 1..18: note = Description of Artificial Sequence: Synthetic oligonucleotide
  source 1..18: mol_type = other DNA
cagaggattagcagcttt

SEQ ID NO: 1292 - protein, 6 aa, synthetic construct
  REGION 1..6: note = Description of Artificial Sequence: Synthetic peptide
QRISSF

SEQ ID NO: 1293-1294 - skipped (2 entries)

SEQ ID NO: 1295 - DNA, 27 bp, synthetic construct
  misc_feature 1..27: note = Description of Artificial Sequence: Synthetic oligonucleotide
  source 1..27: mol_type = other DNA
caacagagttacaggaccccgctcact

SEQ ID NO: 1296 - protein, 9 aa, synthetic construct
  REGION 1..9: note = Description of Artificial Sequence: Synthetic peptide
QQSYRTPLT

SEQ ID NO: 1297 - DNA, 354 bp, synthetic construct
  misc_feature 1..354: note = Description of Artificial Sequence: Synthetic polynucleotide
  source 1..354: mol_type = other DNA
caggtgcagctggtggagtctggggctgaagtgaagaagcctggggcctcagtgaaggtctcctgcaagacttctggatacaccctctccggctattatatgcactggatgcgacaggcccctggacaagggcttgagtggatgggatggattaaccctaaaagtggtgtcacaaattatgcacagaagtttcaggacagagtcgccatgaccagggacacgtccatcagcacagcctacatggaactgagcaggctgagatctgacgacacggccgtgtattactgtgcgagaatgggggacggtgcagtgtttgacttctgggcccagggaaccctggtcaccgtctcctca

SEQ ID NO: 1298 - protein, 118 aa, synthetic construct
  REGION 1..118: note = Description of Artificial Sequence: Synthetic polypeptide
QVQLVESGAEVKKPGASVKVSCKTSGYTLSGYYMHWMRQAPGQGLEWMGWINPKSGVTNYAQKFQDRVAMTRDTSISTAYMELSRLRSDDTAVYYCARMGDGAVFDFWAQGTLVTVSS

SEQ ID NO: 1299 - DNA, 24 bp, synthetic construct
  misc_feature 1..24: note = Description of Artificial Sequence: Synthetic oligonucleotide
  source 1..24: mol_type = other DNA
ggatacaccctctccggctattat

SEQ ID NO: 1300 - protein, 8 aa, synthetic construct
  REGION 1..8: note = Description of Artificial Sequence: Synthetic peptide
GYTLSGYY

SEQ ID NO: 1301 - DNA, 24 bp, synthetic construct
  misc_feature 1..24: note = Description of Artificial Sequence: Synthetic oligonucleotide
  source 1..24: mol_type = other DNA
attaaccctaaaagtggtgtcaca

SEQ ID NO: 1302 - protein, 8 aa, synthetic construct
  REGION 1..8: note = Description of Artificial Sequence: Synthetic peptide
INPKSGVT

SEQ ID NO: 1303 - DNA, 33 bp, synthetic construct; identical to SEQ ID NO: 1255
  misc_feature 1..33: note = Description of Artificial Sequence: Synthetic oligonucleotide
  source 1..33: mol_type = other DNA

SEQ ID NO: 1304 - protein, 11 aa, synthetic construct
  REGION 1..11: note = Description of Artificial Sequence: Synthetic peptide
ARMGDGAVFDF

SEQ ID NO: 1305 - DNA, 324 bp, synthetic construct
  misc_feature 1..324: note = Description of Artificial Sequence: Synthetic polynucleotide
  source 1..324: mol_type = other DNA
gacatccagttgacccagtctccatcctccctgtctgcatctgtaggagacagagtcaccatcacttgccgggcaagtcagaggattagcagctttttaaattggtatcagcagaaaccagggaaagcccctaagctcctaatctatactgcatccaatttacaaaatggggtcccatcaaggttcagtggcagtggatctgggacagatttcactctcaccatcagcagtctgcaacctgaagattttgcaacttactactgtcaacagagttacaggaccccgctcactttcggcggagggaccaagctggagatcaaacga

SEQ ID NO: 1306 - protein, 108 aa, synthetic construct
  REGION 1..108: note = Description of Artificial Sequence: Synthetic polypeptide
DIQLTQSPSSLSASVGDRVTITCRASQRISSFLNWYQQKPGKAPKLLIYTASNLQNGVPSRFSGSGSGTDFTLTISSLQPEDFATYYCQQSYRTPLTFGGGTKLEIKR

SEQ ID NO: 1307 - DNA, 18 bp, synthetic construct
  misc_feature 1..18: note = Description of Artificial Sequence: Synthetic oligonucleotide
  source 1..18: mol_type = other DNA
cagaggattagcagcttt

SEQ ID NO: 1308 - protein, 6 aa, synthetic construct
  REGION 1..6: note = Description of Artificial Sequence: Synthetic peptide
QRISSF

SEQ ID NO: 1309-1310 - skipped (2 entries)

SEQ ID NO: 1311 - DNA, 27 bp, synthetic construct
  misc_feature 1..27: note = Description of Artificial Sequence: Synthetic oligonucleotide
  source 1..27: mol_type = other DNA
caacagagttacaggaccccgctcact

SEQ ID NO: 1312 - protein, 9 aa, synthetic construct
  REGION 1..9: note = Description of Artificial Sequence: Synthetic peptide
QQSYRTPLT

SEQ ID NO: 1313 - DNA, 372 bp, synthetic construct
  misc_feature 1..372: note = Description of Artificial Sequence: Synthetic polynucleotide
  source 1..372: mol_type = other DNA
caggtgcagctggtggagtctgggggaggcgtggtccagcctgggaggtccctgagactctcctgtgcagcctctggattcaccttcagtagctatggcatgcactgggtccgccaggctccaggcaaggggctggagtgggtgtcaactatatcatttgatggaagtaacaaatactatgcagactccgtgaagggccgattcaccatctccagagacaattccaagaacacgctgtatctgcaaatgaacagcctgagacctgaggacacggctgtgtattactgtgcgaaaggggggggtaccagtgggtcctacttttactacggtatggacgtctggggccaagggaccacggtcaccgtctcctca

SEQ ID NO: 1314 - protein, 124 aa, synthetic construct
  REGION 1..124: note = Description of Artificial Sequence: Synthetic polypeptide
QVQLVESGGGVVQPGRSLRLSCAASGFTFSSYGMHWVRQAPGKGLEWVSTISFDGSNKYYADSVKGRFTISRDNSKNTLYLQMNSLRPEDTAVYYCAKGGGTSGSYFYYGMDVWGQGTTVTVSS

SEQ ID NO: 1315 - DNA, 24 bp, synthetic construct
  misc_feature 1..24: note = Description of Artificial Sequence: Synthetic oligonucleotide
  source 1..24: mol_type = other DNA
ggattcaccttcagtagctatggc

SEQ ID NO: 1316 - protein, 8 aa, synthetic construct
  REGION 1..8: note = Description of Artificial Sequence: Synthetic peptide
GFTFSSYG

SEQ ID NO: 1317 - DNA, 24 bp, synthetic construct
  misc_feature 1..24: note = Description of Artificial Sequence: Synthetic oligonucleotide
  source 1..24: mol_type = other DNA
atatcatttgatggaagtaacaaa

SEQ ID NO: 1318 - protein, 8 aa, synthetic construct
  REGION 1..8: note = Description of Artificial Sequence: Synthetic peptide
ISFDGSNK

SEQ ID NO: 1319 - DNA, 51 bp, synthetic construct
  misc_feature 1..51: note = Description of Artificial Sequence: Synthetic oligonucleotide
  source 1..51: mol_type = other DNA
gcgaaaggggggggtaccagtgggtcctacttttactacggtatggacgtc

SEQ ID NO: 1320 - protein, 17 aa, synthetic construct
  REGION 1..17: note = Description of Artificial Sequence: Synthetic peptide
AKGGGTSGSYFYYGMDV

SEQ ID NO: 1321 - DNA, 324 bp, synthetic construct
  misc_feature 1..324: note = Description of Artificial Sequence: Synthetic polynucleotide
  source 1..324: mol_type = other DNA
gccatccagatgacccagtctccatcctccctgtctgcatctgtaggagacagagtcaccatcacttgccgggcaagtcagaggattagcagctttttaaattggtatcagcagaaaccagggaaagcccctaagctcctaatctatactgcatccaatttacaaaatggggtcccatcaaggttcagtggcagtggatctgggacagatttcactctcaccatcagcagtctgcaacctgaagattttgcaacttactactgtcaacagagttacaggaccccgctcactttcggcggagggaccaagctggagatcaaacga

SEQ ID NO: 1322 - protein, 108 aa, synthetic construct
  REGION 1..108: note = Description of Artificial Sequence: Synthetic polypeptide
AIQMTQSPSSLSASVGDRVTITCRASQRISSFLNWYQQKPGKAPKLLIYTASNLQNGVPSRFSGSGSGTDFTLTISSLQPEDFATYYCQQSYRTPLTFGGGTKLEIKR

SEQ ID NO: 1323 - DNA, 18 bp, synthetic construct
  misc_feature 1..18: note = Description of Artificial Sequence: Synthetic oligonucleotide
  source 1..18: mol_type = other DNA
cagaggattagcagcttt

SEQ ID NO: 1324 - protein, 6 aa, synthetic construct
  REGION 1..6: note = Description of Artificial Sequence: Synthetic peptide
QRISSF

SEQ ID NO: 1325-1326 - skipped (2 entries)

SEQ ID NO: 1327 - DNA, 27 bp, synthetic construct
  misc_feature 1..27: note = Description of Artificial Sequence: Synthetic oligonucleotide
  source 1..27: mol_type = other DNA
caacagagttacaggaccccgctcact

SEQ ID NO: 1328 - protein, 9 aa, synthetic construct
  REGION 1..9: note = Description of Artificial Sequence: Synthetic peptide
QQSYRTPLT

SEQ ID NO: 1329 - DNA, 354 bp, synthetic construct
  misc_feature 1..354: note = Description of Artificial Sequence: Synthetic polynucleotide
  source 1..354: mol_type = other DNA
caggttcagctggtgcagtctgggactgaggtgaagaagcctggggcctcaatgaaggtctcctgcaaggcttctggatacaccttcaccggctactatattcactgggtgcgacaggcccctggacaagggcttgagtggatgggatggatcaaccctaacagtgatgtcacaaagtatgcacagaagtttcagggcagggtcaccttgaccagggacacgtccatcagtgcagcctatattgacctgagcaggctgagatctgacgacacggccatttattactgtgcgagaatgggggacggtgcagtgtttgactactggggccagggaaccctggtcaccgtctcctca

SEQ ID NO: 1330 - protein, 118 aa, synthetic construct
  REGION 1..118: note = Description of Artificial Sequence: Synthetic polypeptide
QVQLVQSGTEVKKPGASMKVSCKASGYTFTGYYIHWVRQAPGQGLEWMGWINPNSDVTKYAQKFQGRVTLTRDTSISAAYIDLSRLRSDDTAIYYCARMGDGAVFDYWGQGTLVTVSS

SEQ ID NO: 1331 - DNA, 24 bp, synthetic construct
  misc_feature 1..24: note = Description of Artificial Sequence: Synthetic oligonucleotide
  source 1..24: mol_type = other DNA
ggatacaccttcaccggctactat

SEQ ID NO: 1332 - protein, 8 aa, synthetic construct
  REGION 1..8: note = Description of Artificial Sequence: Synthetic peptide
GYTFTGYY

SEQ ID NO: 1333 - DNA, 24 bp, synthetic construct
  misc_feature 1..24: note = Description of Artificial Sequence: Synthetic oligonucleotide
  source 1..24: mol_type = other DNA
atcaaccctaacagtgatgtcaca

SEQ ID NO: 1334 - protein, 8 aa, synthetic construct
  REGION 1..8: note = Description of Artificial Sequence: Synthetic peptide
INPNSDVT

SEQ ID NO: 1335 - DNA, 33 bp, synthetic construct
  misc_feature 1..33: note = Description of Artificial Sequence: Synthetic oligonucleotide
  source 1..33: mol_type = other DNA
gcgagaatgggggacggtgcagtgtttgactac

SEQ ID NO: 1336 - protein, 11 aa, synthetic construct
  REGION 1..11: note = Description of Artificial Sequence: Synthetic peptide
ARMGDGAVFDY

SEQ ID NO: 1337 - DNA, 324 bp, synthetic construct
  misc_feature 1..324: note = Description of Artificial Sequence: Synthetic polynucleotide
  source 1..324: mol_type = other DNA
gacatccagttgacccagtctccatcctccctgtctgcatctgtaggagacagagtcaccatcacttgccgggcaagtcaacgcattagcagctatttaaattggtatcaacagaaaccagggaaagcccctaaggtgctgatctctgttgcatccagtttacaaagtggggtcccatcaaggttcagtggcagtggatttgggacagatttcactctcaccatcagcagtctgcaacctgaggattctgcatcttactactgtcaacagagttacaataccccgctcactttcggcggcgggaccaagctggagatcaaacga

SEQ ID NO: 1338 - protein, 108 aa, synthetic construct
  REGION 1..108: note = Description of Artificial Sequence: Synthetic polypeptide
DIQLTQSPSSLSASVGDRVTITCRASQRISSYLNWYQQKPGKAPKVLISVASSLQSGVPSRFSGSGFGTDFTLTISSLQPEDSASYYCQQSYNTPLTFGGGTKLEIKR

SEQ ID NO: 1339 - DNA, 18 bp, synthetic construct
  misc_feature 1..18: note = Description of Artificial Sequence: Synthetic oligonucleotide
  source 1..18: mol_type = other DNA
caacgcattagcagctat

SEQ ID NO: 1340 - protein, 6 aa, synthetic construct
  REGION 1..6: note = Description of Artificial Sequence: Synthetic peptide
QRISSY

SEQ ID NO: 1341-1342 - skipped (2 entries)

SEQ ID NO: 1343 - DNA, 27 bp, synthetic construct
  misc_feature 1..27: note = Description of Artificial Sequence: Synthetic oligonucleotide
  source 1..27: mol_type = other DNA
caacagagttacaataccccgctcact

SEQ ID NO: 1344 - protein, 9 aa, synthetic construct
  REGION 1..9: note = Description of Artificial Sequence: Synthetic peptide
QQSYNTPLT

SEQ ID NO: 1345 - DNA, 354 bp, synthetic construct
  misc_feature 1..354: note = Description of Artificial Sequence: Synthetic polynucleotide
  source 1..354: mol_type = other DNA
gaggtgcagctggtggagtctggggctgaagtgaagaagcctggggcctcagtgaaggtctcctgcaagacttctggatacagtttcattggctattatatacactggatgcgacaggcccctggacaagggcttgaatggatgggatggatcaaccctaagagtggtgtcacaaattatgcacagaggtttcagggcagggtcaccatgaccagggacacgtccatcagtactgcctacatggaactgagcaggctgaaatctgacgacacggccgtgtatttctgtgcgagaatgggggacggtgcagtgtttgacttctggggccagggaaccctggtcaccgtctcctca

SEQ ID NO: 1346 - protein, 118 aa, synthetic construct
  REGION 1..118: note = Description of Artificial Sequence: Synthetic polypeptide
EVQLVESGAEVKKPGASVKVSCKTSGYSFIGYYIHWMRQAPGQGLEWMGWINPKSGVTNYAQRFQGRVTMTRDTSISTAYMELSRLKSDDTAVYFCARMGDGAVFDFWGQGTLVTVSS

SEQ ID NO: 1347 - DNA, 24 bp, synthetic construct
  misc_feature 1..24: note = Description of Artificial Sequence: Synthetic oligonucleotide
  source 1..24: mol_type = other DNA
ggatacagtttcattggctattat

SEQ ID NO: 1348 - protein, 8 aa, synthetic construct
  REGION 1..8: note = Description of Artificial Sequence: Synthetic peptide
GYSFIGYY

SEQ ID NO: 1349 - DNA, 24 bp, synthetic construct
  misc_feature 1..24: note = Description of Artificial Sequence: Synthetic oligonucleotide
  source 1..24: mol_type = other DNA
atcaaccctaagagtggtgtcaca

SEQ ID NO: 1350 - protein, 8 aa, synthetic construct
  REGION 1..8: note = Description of Artificial Sequence: Synthetic peptide
INPKSGVT

SEQ ID NO: 1351 - DNA, 33 bp, synthetic construct; identical to SEQ ID NO: 1255
  misc_feature 1..33: note = Description of Artificial Sequence: Synthetic oligonucleotide
  source 1..33: mol_type = other DNA

SEQ ID NO: 1352 - protein, 11 aa, synthetic construct
  REGION 1..11: note = Description of Artificial Sequence: Synthetic peptide
ARMGDGAVFDF

SEQ ID NO: 1353 - DNA, 324 bp, synthetic construct
  misc_feature 1..324: note = Description of Artificial Sequence: Synthetic polynucleotide
  source 1..324: mol_type = other DNA
gacatccagttgacccagtctccatcctccctgtctgcatctgtaggagacagagtcaccatcacttgccgggcaagtcagaggattagcagctttttaaattggtatcagcagaaaccagggaaagtccctaagctcctgatctatactgcatccaatttacaaaatggggtcccatcaaggttcagtggcactggatctgggacagatttcactctcaccatcagcagtctgcaacctgaagattttgcaacttactactgtcaacagagttacaggaccccgctcactttcggcggagggaccaaagtggatatcaaacga

SEQ ID NO: 1354 - protein, 108 aa, synthetic construct
  REGION 1..108: note = Description of Artificial Sequence: Synthetic polypeptide
DIQLTQSPSSLSASVGDRVTITCRASQRISSFLNWYQQKPGKVPKLLIYTASNLQNGVPSRFSGTGSGTDFTLTISSLQPEDFATYYCQQSYRTPLTFGGGTKVDIKR

SEQ ID NO: 1355 - DNA, 18 bp, synthetic construct
  misc_feature 1..18: note = Description of Artificial Sequence: Synthetic oligonucleotide
  source 1..18: mol_type = other DNA
cagaggattagcagcttt

SEQ ID NO: 1356 - protein, 6 aa, synthetic construct
  REGION 1..6: note = Description of Artificial Sequence: Synthetic peptide
QRISSF

SEQ ID NO: 1357-1358 - skipped (2 entries)

SEQ ID NO: 1359 - DNA, 27 bp, synthetic construct
  misc_feature 1..27: note = Description of Artificial Sequence: Synthetic oligonucleotide
  source 1..27: mol_type = other DNA
caacagagttacaggaccccgctcact

SEQ ID NO: 1360 - protein, 9 aa, synthetic construct
  REGION 1..9: note = Description of Artificial Sequence: Synthetic peptide
QQSYRTPLT

SEQ ID NO: 1361 - DNA, 354 bp, synthetic construct
  misc_feature 1..354: note = Description of Artificial Sequence: Synthetic polynucleotide
  source 1..354: mol_type = other DNA
gaggtgcagctggtggagtctggggctgaagtgaagaagcctggggcctcagtgaaggtctcctgcaagacttctggatacaccttcaccggctactatatgcactggatacgacaggcccctggacaagggcttgagtggatgggatggatcaaccctaaaagtggtggcacaaattatgcacagaagtttcagggcagggtcaccatgaccagggacacgtccatcagcacagcctacatggaactgagcaggctgagatccgacgacatggccgtgtattattgtgcgagaatgggggacggtgcagtgtttgacttctggggccagggaaccctggtcaccgtctcctca

SEQ ID NO: 1362 - protein, 118 aa, synthetic construct
  REGION 1..118: note = Description of Artificial Sequence: Synthetic polypeptide
EVQLVESGAEVKKPGASVKVSCKTSGYTFTGYYMHWIRQAPGQGLEWMGWINPKSGGTNYAQKFQGRVTMTRDTSISTAYMELSRLRSDDMAVYYCARMGDGAVFDFWGQGTLVTVSS

SEQ ID NO: 1363 - DNA, 24 bp, synthetic construct
  misc_feature 1..24: note = Description of Artificial Sequence: Synthetic oligonucleotide
  source 1..24: mol_type = other DNA
ggatacaccttcaccggctactat

SEQ ID NO: 1364 - protein, 8 aa, synthetic construct
  REGION 1..8: note = Description of Artificial Sequence: Synthetic peptide
GYTFTGYY

SEQ ID NO: 1365 - DNA, 24 bp, synthetic construct
  misc_feature 1..24: note = Description of Artificial Sequence: Synthetic oligonucleotide
  source 1..24: mol_type = other DNA
atcaaccctaaaagtggtggcaca

SEQ ID NO: 1366 - protein, 8 aa, synthetic construct
  REGION 1..8: note = Description of Artificial Sequence: Synthetic peptide
INPKSGGT

SEQ ID NO: 1367 - DNA, 33 bp, synthetic construct; identical to SEQ ID NO: 1255
  misc_feature 1..33: note = Description of Artificial Sequence: Synthetic oligonucleotide
  source 1..33: mol_type = other DNA

SEQ ID NO: 1368 - protein, 11 aa, synthetic construct
  REGION 1..11: note = Description of Artificial Sequence: Synthetic peptide
ARMGDGAVFDF

SEQ ID NO: 1369 - DNA, 327 bp, synthetic construct
  misc_feature 1..327: note = Description of Artificial Sequence: Synthetic polynucleotide
  source 1..327: mol_type = other DNA
gacatcgtgatgacccagtctccatcctccctgtctgcatctgtaggagacagagtcaccatcacttgccgggcaagtcagagcattagcagctatttaaattggtatcagcagaaaccagggaaagcccctaagctcctgatctatgctgcatccagtttgcaaagtggggtcccatcaaggttcagtggcagtggatctgggacagatttcactctcaccatcagcagtctgcaacctgaagattttgcaacttactactgtcaacagagttacagtacccctccgctcactttcggcggagggaccaaagtggatatcaaacga

SEQ ID NO: 1370 - protein, 109 aa, synthetic construct
  REGION 1..109: note = Description of Artificial Sequence: Synthetic polypeptide
DIVMTQSPSSLSASVGDRVTITCRASQSISSYLNWYQQKPGKAPKLLIYAASSLQSGVPSRFSGSGSGTDFTLTISSLQPEDFATYYCQQSYSTPPLTFGGGTKVDIKR

SEQ ID NO: 1371 - DNA, 18 bp, synthetic construct
  misc_feature 1..18: note = Description of Artificial Sequence: Synthetic oligonucleotide
  source 1..18: mol_type = other DNA
cagagcattagcagctat

SEQ ID NO: 1372 - protein, 6 aa, synthetic construct
  REGION 1..6: note = Description of Artificial Sequence: Synthetic peptide
QSISSY

SEQ ID NO: 1373-1374 - skipped (2 entries)

SEQ ID NO: 1375 - DNA, 30 bp, synthetic construct
  misc_feature 1..30: note = Description of Artificial Sequence: Synthetic oligonucleotide
  source 1..30: mol_type = other DNA
caacagagttacagtacccctccgctcact

SEQ ID NO: 1376 - protein, 10 aa, synthetic construct
  REGION 1..10: note = Description of Artificial Sequence: Synthetic peptide
QQSYSTPPLT

SEQ ID NO: 1377 - DNA, 354 bp, synthetic construct
  misc_feature 1..354: note = Description of Artificial Sequence: Synthetic polynucleotide
  source 1..354: mol_type = other DNA
caggttcagctggtgcagtctgggactgaggtgaagaagcctggggcctcagtgaaggtctcctgcaaggcttctggatacaccttcaccggctactatatgcactgggtgcgacaggcccctggacaagggcttgagtggatgggatggatcaaccctaacagtgatgtcacaaactatgcacagaagtttcagggcagggtcaccttgaccagggacacgtccatcagtacagcctacattgacctgagcaggctgagatctgacgacacggccatttattactgtgcgagaatgggggacggtgcagtgtttgactactggggccagggaaccctggtcaccgtctcctca

SEQ ID NO: 1378 - protein, 118 aa, synthetic construct
  REGION 1..118: note = Description of Artificial Sequence: Synthetic polypeptide
QVQLVQSGTEVKKPGASVKVSCKASGYTFTGYYMHWVRQAPGQGLEWMGWINPNSDVTNYAQKFQGRVTLTRDTSISTAYIDLSRLRSDDTAIYYCARMGDGAVFDYWGQGTLVTVSS

SEQ ID NO: 1379 - DNA, 24 bp, synthetic construct
  misc_feature 1..24: note = Description of Artificial Sequence: Synthetic oligonucleotide
  source 1..24: mol_type = other DNA
ggatacaccttcaccggctactat

SEQ ID NO: 1380 - protein, 8 aa, synthetic construct
  REGION 1..8: note = Description of Artificial Sequence: Synthetic peptide
GYTFTGYY

SEQ ID NO: 1381 - DNA, 24 bp, synthetic construct
  misc_feature 1..24: note = Description of Artificial Sequence: Synthetic oligonucleotide
  source 1..24: mol_type = other DNA
atcaaccctaacagtgatgtcaca

SEQ ID NO: 1382 - protein, 8 aa, synthetic construct
  REGION 1..8: note = Description of Artificial Sequence: Synthetic peptide
INPNSDVT

SEQ ID NO: 1383 - DNA, 33 bp, synthetic construct; identical to SEQ ID NO: 1335
  misc_feature 1..33: note = Description of Artificial Sequence: Synthetic oligonucleotide
  source 1..33: mol_type = other DNA

SEQ ID NO: 1384 - protein, 11 aa, synthetic construct
  REGION 1..11: note = Description of Artificial Sequence: Synthetic peptide
ARMGDGAVFDY

SEQ ID NO: 1385 - DNA, 324 bp, synthetic construct
  misc_feature 1..324: note = Description of Artificial Sequence: Synthetic polynucleotide
  source 1..324: mol_type = other DNA
gacatccagatgacccagtctccatcctccctgtctgcatctgtaggagacagagtcaccatcacttgccgggcaagtcagcgcattagcagctatttaaattggtatcagcagaaaccagggaaagcccctaaggtgctgatctctgttgcatccagtttgcaaagtggggtcccatcaaggttcagtggcagtggatctgggacagatttcactctcaccattagtagtctgcaacctgaggattttgcatcttactactgtcaacagagttacaataccccgctcactttcggcggagggaccaaggtggagatcaaacga

SEQ ID NO: 1386 - protein, 108 aa, synthetic construct
  REGION 1..108: note = Description of Artificial Sequence: Synthetic polypeptide
DIQMTQSPSSLSASVGDRVTITCRASQRISSYLNWYQQKPGKAPKVLISVASSLQSGVPSRFSGSGSGTDFTLTISSLQPEDFASYYCQQSYNTPLTFGGGTKVEIKR

SEQ ID NO: 1387 - DNA, 18 bp, synthetic construct
  misc_feature 1..18: note = Description of Artificial Sequence: Synthetic oligonucleotide
  source 1..18: mol_type = other DNA
cagcgcattagcagctat

SEQ ID NO: 1388 - protein, 6 aa, synthetic construct
  REGION 1..6: note = Description of Artificial Sequence: Synthetic peptide
QRISSY

SEQ ID NO: 1389-1390 - skipped (2 entries)

SEQ ID NO: 1391 - DNA, 27 bp, synthetic construct
  misc_feature 1..27: note = Description of Artificial Sequence: Synthetic oligonucleotide
  source 1..27: mol_type = other DNA
caacagagttacaataccccgctcact

SEQ ID NO: 1392 - protein, 9 aa, synthetic construct
  REGION 1..9: note = Description of Artificial Sequence: Synthetic peptide
QQSYNTPLT

SEQ ID NO: 1393 - DNA, 381 bp, synthetic construct
  misc_feature 1..381: note = Description of Artificial Sequence: Synthetic polynucleotide
  source 1..381: mol_type = other DNA
caggtgcagctggtgcagtctgggggaggcttggtcaagcctggggggtccctgagactctcctgtgcagcctctggattcaccttcagtagctatgacatgagctgggtccgccaggctccagggaaggggctggagtgggtttcatacattagtagtagtggtaataccatacattacgcagactctgtgaagggccgattcaccatctccagagacaattccaagaactcactttatctgcaaatgaacagcctgagagccgaggacacggccgtgtattactgtgcgaaagccggtcccgctacggtgacacggaggtactactactactacggtttggacgtctggggccaagggaccacggtcaccgtctcctca

SEQ ID NO: 1394 - protein, 127 aa, synthetic construct
  REGION 1..127: note = Description of Artificial Sequence: Synthetic polypeptide
QVQLVQSGGGLVKPGGSLRLSCAASGFTFSSYDMSWVRQAPGKGLEWVSYISSSGNTIHYADSVKGRFTISRDNSKNSLYLQMNSLRAEDTAVYYCAKAGPATVTRRYYYYYGLDVWGQGTTVTVSS

SEQ ID NO: 1395 - DNA, 24 bp, synthetic construct
  misc_feature 1..24: note = Description of Artificial Sequence: Synthetic oligonucleotide
  source 1..24: mol_type = other DNA
ggattcaccttcagtagctatgac

SEQ ID NO: 1396 - protein, 8 aa, synthetic construct
  REGION 1..8: note = Description of Artificial Sequence: Synthetic peptide
GFTFSSYD

SEQ ID NO: 1397 - DNA, 24 bp, synthetic construct
  misc_feature 1..24: note = Description of Artificial Sequence: Synthetic oligonucleotide
  source 1..24: mol_type = other DNA
attagtagtagtggtaataccata

SEQ ID NO: 1398 - protein, 8 aa, synthetic construct
  REGION 1..8: note = Description of Artificial Sequence: Synthetic peptide
ISSSGNTI

SEQ ID NO: 1399 - DNA, 60 bp, synthetic construct
  misc_feature 1..60: note = Description of Artificial Sequence: Synthetic oligonucleotide
  source 1..60: mol_type = other DNA
gcgaaagccggtcccgctacggtgacacggaggtactactactactacggtttggacgtc

SEQ ID NO: 1400 - protein, 20 aa, synthetic construct
  REGION 1..20: note = Description of Artificial Sequence: Synthetic peptide
AKAGPATVTRRYYYYYGLDV

SEQ ID NO: 1401 - DNA, 324 bp, synthetic construct
  misc_feature 1..324: note = Description of Artificial Sequence: Synthetic polynucleotide
  source 1..324: mol_type = other DNA
gacatcgtgatgacccagtctccatcctccctgtctgcatctgtacgagacagagtcaccatcacttgccgggcaagtcagagaattagcagctatttaaattggtttcagcagaaaccagggaaagcccctaaggtcctgatctatactgcatccagtttgcaaaatggggtcccatcaaggttcagtggcagtggatctgggacagatttcactctcaccatcagcagtctgcaacctgaagactttgcaacttactactgtcagcagagttacaggaccccgctcactttcggcggagggaccaaggtggagatcaaacga

SEQ ID NO: 1402 - protein, 108 aa, synthetic construct
  REGION 1..108: note = Description of Artificial Sequence: Synthetic polypeptide
DIVMTQSPSSLSASVRDRVTITCRASQRISSYLNWFQQKPGKAPKVLIYTASSLQNGVPSRFSGSGSGTDFTLTISSLQPEDFATYYCQQSYRTPLTFGGGTKVEIKR

SEQ ID NO: 1403 - DNA, 18 bp, synthetic construct
  misc_feature 1..18: note = Description of Artificial Sequence: Synthetic oligonucleotide
  source 1..18: mol_type = other DNA
cagagaattagcagctat

SEQ ID NO: 1404 - protein, 6 aa, synthetic construct
  REGION 1..6: note = Description of Artificial Sequence: Synthetic peptide
QRISSY

SEQ ID NO: 1405-1406 - skipped (2 entries)

SEQ ID NO: 1407 - DNA, 27 bp, synthetic construct
  misc_feature 1..27: note = Description of Artificial Sequence: Synthetic oligonucleotide
  source 1..27: mol_type = other DNA
cagcagagttacaggaccccgctcact

SEQ ID NO: 1408 - protein, 9 aa, synthetic construct
  REGION 1..9: note = Description of Artificial Sequence: Synthetic peptide
QQSYRTPLT

SEQ ID NO: 1409 - DNA, 354 bp, synthetic construct
  misc_feature 1..354: note = Description of Artificial Sequence: Synthetic polynucleotide
  source 1..354: mol_type = other DNA
caggtgcagctggtacagtctggggctgaggtgaagaagcctggggcctcagtgaaggtctcctgcaaggcttctggatacacattcatcggctactatatgcactgggtgcgacaggcccctggacaagggcttgagtggatgggatggatcaaccctaaaagtggtggcacaaactatgcacagaagtttcagggcagggtcaccatgaccggggacacgtccatcagcacagcctacatggagctgagcaggctgagatctgacgacacggccgtgttttactgtgcgagaatgggggacggtgcaatgtttgactactggggccagggaaccctggtcaccgtctcctca

SEQ ID NO: 1410 - protein, 118 aa, synthetic construct
  REGION 1..118: note = Description of Artificial Sequence: Synthetic polypeptide
QVQLVQSGAEVKKPGASVKVSCKASGYTFIGYYMHWVRQAPGQGLEWMGWINPKSGGTNYAQKFQGRVTMTGDTSISTAYMELSRLRSDDTAVFYCARMGDGAMFDYWGQGTLVTVSS

SEQ ID NO: 1411 - DNA, 24 bp, synthetic construct
  misc_feature 1..24: note = Description of Artificial Sequence: Synthetic oligonucleotide
  source 1..24: mol_type = other DNA
ggatacacattcatcggctactat

SEQ ID NO: 1412 - protein, 8 aa, synthetic construct
  REGION 1..8: note = Description of Artificial Sequence: Synthetic peptide
GYTFIGYY

SEQ ID NO: 1413 - DNA, 24 bp, synthetic construct
  misc_feature 1..24: note = Description of Artificial Sequence: Synthetic oligonucleotide
  source 1..24: mol_type = other DNA
atcaaccctaaaagtggtggcaca

SEQ ID NO: 1414 - protein, 8 aa, synthetic construct
  REGION 1..8: note = Description of Artificial Sequence: Synthetic peptide
INPKSGGT

SEQ ID NO: 1415 - DNA, 33 bp, synthetic construct
  misc_feature 1..33: note = Description of Artificial Sequence: Synthetic oligonucleotide
  source 1..33: mol_type = other DNA
gcgagaatgggggacggtgcaatgtttgactac

SEQ ID NO: 1416 - protein, 11 aa, synthetic construct
  REGION 1..11: note = Description of Artificial Sequence: Synthetic peptide
ARMGDGAMFDY

SEQ ID NO: 1417 - DNA, 321 bp, synthetic construct
  misc_feature 1..321: note = Description of Artificial Sequence: Synthetic polynucleotide
  source 1..321: mol_type = other DNA
gacatccagatgacccagtctccatcctccctgtctgcatctgtaggagacagagtcaccatcacttgccgggcaagtcagagaattagcagctatttaaattggtatcagcagaaagcagggaaagcccctaaggtcctgatctatactgcatccagtttgcaaagtggggtcccatcacgattcagtggcagtggatctgggacagatttcactctcaccatcagcagtctgcaacctgaagattttgcaacttactactgtcaacagagttacagtaccccgctcactttcggcggagggaccaaggtggagatcaaa

SEQ ID NO: 1418 - protein, 107 aa, synthetic construct
  REGION 1..107: note = Description of Artificial Sequence: Synthetic polypeptide
DIQMTQSPSSLSASVGDRVTITCRASQRISSYLNWYQQKAGKAPKVLIYTASSLQSGVPSRFSGSGSGTDFTLTISSLQPEDFATYYCQQSYSTPLTFGGGTKVEIK

SEQ ID NO: 1419 - DNA, 18 bp, synthetic construct
  misc_feature 1..18: note = Description of Artificial Sequence: Synthetic oligonucleotide
  source 1..18: mol_type = other DNA
cagagaattagcagctat

SEQ ID NO: 1420 - protein, 6 aa, synthetic construct
  REGION 1..6: note = Description of Artificial Sequence: Synthetic peptide
QRISSY

SEQ ID NO: 1421-1422 - skipped (2 entries)

SEQ ID NO: 1423 - DNA, 27 bp, synthetic construct
  misc_feature 1..27: note = Description of Artificial Sequence: Synthetic oligonucleotide
  source 1..27: mol_type = other DNA
caacagagttacagtaccccgctcact

SEQ ID NO: 1424 - protein, 9 aa, synthetic construct
  REGION 1..9: note = Description of Artificial Sequence: Synthetic peptide
QQSYSTPLT

SEQ ID NO: 1425 - DNA, 375 bp, synthetic construct
  misc_feature 1..375: note = Description of Artificial Sequence: Synthetic polynucleotide
  source 1..375: mol_type = other DNA
caggtgcagctggtacagtctgggggaggcgtggtacagcctggggggtccctgagactctcctgtgcagcctctggattcacctttgatgattatgccatgcactgggtccgtcaagctccagggaagggtctggagtgggtctctcttattagtggggatggtggtagcacatactatgcagactctgtgaagggccgattcaccatctccagagacaacagcaaaaactccctgtatctgcaaatgaacagtctgagaactgaggacaccgccttgtattactgtgcaaaagatgatagcagctcgtcctggtactactactactacggtatggacgtctggggccgagggaccacggtcaccgtctcctca

SEQ ID NO: 1426 - protein, 125 aa, synthetic construct
  REGION 1..125: note = Description of Artificial Sequence: Synthetic polypeptide
QVQLVQSGGGVVQPGGSLRLSCAASGFTFDDYAMHWVRQAPGKGLEWVSLISGDGGSTYYADSVKGRFTISRDNSKNSLYLQMNSLRTEDTALYYCAKDDSSSSWYYYYYGMDVWGRGTTVTVSS

SEQ ID NO: 1427 - DNA, 24 bp, synthetic construct
  misc_feature 1..24: note = Description of Artificial Sequence: Synthetic oligonucleotide
  source 1..24: mol_type = other DNA
ggattcacctttgatgattatgcc

SEQ ID NO: 1428 - protein, 8 aa, synthetic construct
  REGION 1..8: note = Description of Artificial Sequence: Synthetic peptide
GFTFDDYA

SEQ ID NO: 1429 - DNA, 24 bp, synthetic construct
  misc_feature 1..24: note = Description of Artificial Sequence: Synthetic oligonucleotide
  source 1..24: mol_type = other DNA
attagtggggatggtggtagcaca

SEQ ID NO: 1430 - protein, 8 aa, synthetic construct
  REGION 1..8: note = Description of Artificial Sequence: Synthetic peptide
ISGDGGST

SEQ ID NO: 1431 - DNA, 54 bp, synthetic construct
  misc_feature 1..54: note = Description of Artificial Sequence: Synthetic oligonucleotide
  source 1..54: mol_type = other DNA
gcaaaagatgatagcagctcgtcctggtactactactactacggtatggacgtc

SEQ ID NO: 1432 - protein, 18 aa, synthetic construct
  REGION 1..18: note = Description of Artificial Sequence: Synthetic peptide
AKDDSSSSWYYYYYGMDV

SEQ ID NO: 1433 - DNA, 324 bp, synthetic construct
  misc_feature 1..324: note = Description of Artificial Sequence: Synthetic polynucleotide
  source 1..324: mol_type = other DNA
gacatccagatgacccagtctccatcctccctgtctgcatctgtaggagacagagtcaccatcacttgccgggcaagtcagcgcattagcagctatttaaattggtatcagcagaaaccagggaaagcccctaaggtgctgatctctgttgcatccagtttgcaaagtggggtcccatcaaggttcagtggcagtggatctgggacagatttcactctcaccatcagcagtctgcaacctgaggattttgcatcttactactgtcaacagagttacaataccccgctcactttcggcggagggaccaaggtggagatcaaacga

SEQ ID NO: 1434 - protein, 108 aa, synthetic construct; identical to SEQ ID NO: 1386
  REGION 1..108: note = Description of Artificial Sequence: Synthetic polypeptide

SEQ ID NO: 1435 - DNA, 18 bp, synthetic construct
  misc_feature 1..18: note = Description of Artificial Sequence: Synthetic oligonucleotide
  source 1..18: mol_type = other DNA
cagcgcattagcagctat

SEQ ID NO: 1436 - protein, 6 aa, synthetic construct
  REGION 1..6: note = Description of Artificial Sequence: Synthetic peptide
QRISSY

SEQ ID NO: 1437-1438 - skipped (2 entries)

SEQ ID NO: 1439 - DNA, 27 bp, synthetic construct
  misc_feature 1..27: note = Description of Artificial Sequence: Synthetic oligonucleotide
  source 1..27: mol_type = other DNA
caacagagttacaataccccgctcact

SEQ ID NO: 1440 - protein, 9 aa, synthetic construct
  REGION 1..9: note = Description of Artificial Sequence: Synthetic peptide
QQSYNTPLT

SEQ ID NO: 1441 - DNA, 372 bp, synthetic construct
  misc_feature 1..372: note = Description of Artificial Sequence: Synthetic polynucleotide
  source 1..372: mol_type = other DNA
gaggtgcagctggtggagtctgggggaggcttggtacagcctggcaggtccctgagactctcctgtgcagcctctggattcacctttggtgattataccatgcactgggtccggcaagctccagggaagggcctggagtgggtctccgatattagttggaatagtggtagcaaagactatgcggactctgtgaagggccgattcaccatctccagagacaacgccaagaactccctctatcttcaaatgaacagtctgagaactgaggatacggccttttattactgtgcaaaagatagtaggggctacggtctctactaccacctcggtttggacgtctggggccaagggaccacggtcaccgtctcctca

SEQ ID NO: 1442 - protein, 124 aa, synthetic construct
  REGION 1..124: note = Description of Artificial Sequence: Synthetic polypeptide
EVQLVESGGGLVQPGRSLRLSCAASGFTFGDYTMHWVRQAPGKGLEWVSDISWNSGSKDYADSVKGRFTISRDNAKNSLYLQMNSLRTEDTAFYYCAKDSRGYGLYYHLGLDVWGQGTTVTVSS

SEQ ID NO: 1443 - DNA, 24 bp, synthetic construct
  misc_feature 1..24: note = Description of Artificial Sequence: Synthetic oligonucleotide
  source 1..24: mol_type = other DNA
ggattcacctttggtgattatacc

SEQ ID NO: 1444 - protein, 8 aa, synthetic construct
  REGION 1..8: note = Description of Artificial Sequence: Synthetic peptide
GFTFGDYT

SEQ ID NO: 1445 - DNA, 24 bp, synthetic construct
  misc_feature 1..24: note = Description of Artificial Sequence: Synthetic oligonucleotide
  source 1..24: mol_type = other DNA
attagttggaatagtggtagcaaa

SEQ ID NO: 1446 - protein, 8 aa, synthetic construct
  REGION 1..8: note = Description of Artificial Sequence: Synthetic peptide
ISWNSGSK

SEQ ID NO: 1447 - DNA, 51 bp, synthetic construct
  misc_feature 1..51: note = Description of Artificial Sequence: Synthetic oligonucleotide
  source 1..51: mol_type = other DNA
gcaaaagatagtaggggctacggtctctactaccacctcggtttggacgtc

SEQ ID NO: 1448 - protein, 17 aa, synthetic construct
  REGION 1..17: note = Description of Artificial Sequence: Synthetic peptide
AKDSRGYGLYYHLGLDV

SEQ ID NO: 1449 - DNA, 372 bp, synthetic construct
  misc_feature 1..372: note = Description of Artificial Sequence: Synthetic polynucleotide
  source 1..372: mol_type = other DNA
gaggtgcagctggtggagtctgggggaggcttggtgcagcctggcaggtccctgagactctcctgtgcagcctctggattcacctttgctgattataccatgcactgggtccggcaagctccagggaagggcctggagtgggtctcagatattagttggaatagtggtagtatagcctatgcggactctgtgaagggccgattcaccatctccagagacaacgccaagaactccctctatcttcaaatgaacagtctgagaactgaggacacggccttttattactgtgcaaaagatagtaggggctacggtcactataagtacctcggtttggacgtctggggccaagggaccacggtcaccgtctcctca

SEQ ID NO: 1450 - protein, 124 aa, synthetic construct
  REGION 1..124: note = Description of Artificial Sequence: Synthetic polypeptide
EVQLVESGGGLVQPGRSLRLSCAASGFTFADYTMHWVRQAPGKGLEWVSDISWNSGSIAYADSVKGRFTISRDNAKNSLYLQMNSLRTEDTAFYYCAKDSRGYGHYKYLGLDVWGQGTTVTVSS

SEQ ID NO: 1451 - DNA, 24 bp, synthetic construct
  misc_feature 1..24: note = Description of Artificial Sequence: Synthetic oligonucleotide
  source 1..24: mol_type = other DNA
ggattcacctttgctgattatacc

SEQ ID NO: 1452 - protein, 8 aa, synthetic construct
  REGION 1..8: note = Description of Artificial Sequence: Synthetic peptide
GFTFADYT

SEQ ID NO: 1453 - DNA, 24 bp, synthetic construct
  misc_feature 1..24: note = Description of Artificial Sequence: Synthetic oligonucleotide
  source 1..24: mol_type = other DNA
attagttggaatagtggtagtata

SEQ ID NO: 1454 - protein, 8 aa, synthetic construct
  REGION 1..8: note = Description of Artificial Sequence: Synthetic peptide
ISWNSGSI

SEQ ID NO: 1455 - DNA, 51 bp, synthetic construct
  misc_feature 1..51: note = Description of Artificial Sequence: Synthetic oligonucleotide
  source 1..51: mol_type = other DNA
gcaaaagatagtaggggctacggtcactataagtacctcggtttggacgtc

SEQ ID NO: 1456 - protein, 17 aa, synthetic construct
  REGION 1..17: note = Description of Artificial Sequence: Synthetic peptide
AKDSRGYGHYKYLGLDV

SEQ ID NO: 1457 - DNA, 372 bp, synthetic construct
  misc_feature 1..372: note = Description of Artificial Sequence: Synthetic polynucleotide
  source 1..372: mol_type = other DNA
gaggtgcagctggtggagtctgggggaggcatggtacagcctggcaggtccctgagactctcctgtgcagcctctggattccccttcaatgattacaccatgcactgggtccggcaagtcccagggaggggcctggagtgggtctcagatattagttggaatagcggcagtaaaggctatgcggactctgtgaagggtcgattcatcatctccagagacaacgccaagaactccctgtacctgcaaatgaacagtctgagagttgaagacacggccttgtattactgtgtaaaagatggaagtggctacgggaggttccattattacgctatggacgtctggggccaagggaccacggtcaccgtctcctca

SEQ ID NO: 1458 - protein, 124 aa, synthetic construct
  REGION 1..124: note = Description of Artificial Sequence: Synthetic polypeptide
EVQLVESGGGMVQPGRSLRLSCAASGFPFNDYTMHWVRQVPGRGLEWVSDISWNSGSKGYADSVKGRFIISRDNAKNSLYLQMNSLRVEDTALYYCVKDGSGYGRFHYYAMDVWGQGTTVTVSS

SEQ ID NO: 1459 - DNA, 24 bp, synthetic construct
  misc_feature 1..24: note = Description of Artificial Sequence: Synthetic oligonucleotide
  source 1..24: mol_type = other DNA
ggattccccttcaatgattacacc

SEQ ID NO: 1460 - protein, 8 aa, synthetic construct
  REGION 1..8: note = Description of Artificial Sequence: Synthetic peptide
GFPFNDYT

SEQ ID NO: 1461 - DNA, 24 bp, synthetic construct
  misc_feature 1..24: note = Description of Artificial Sequence: Synthetic oligonucleotide
  source 1..24: mol_type = other DNA
attagttggaatagcggcagtaaa

SEQ ID NO: 1462 - protein, 8 aa, synthetic construct
  REGION 1..8: note = Description of Artificial Sequence: Synthetic peptide
ISWNSGSK

SEQ ID NO: 1463 - DNA, 51 bp, synthetic construct
  misc_feature 1..51: note = Description of Artificial Sequence: Synthetic oligonucleotide
  source 1..51: mol_type = other DNA
gtaaaagatggaagtggctacgggaggttccattattacgctatggacgtc

SEQ ID NO: 1464 - protein, 17 aa, synthetic construct
  REGION 1..17: note = Description of Artificial Sequence: Synthetic peptide
VKDGSGYGRFHYYAMDV

SEQ ID NO: 1465 - DNA, 372 bp, synthetic construct
  misc_feature 1..372: note = Description of Artificial Sequence: Synthetic polynucleotide
  source 1..372: mol_type = other DNA
gaggtgcagctggtggagtctggtggaggcttggtacagcctggcaggtccctgagactctcctgtgcagcctctggattcacctttgctgattataccatgcactgggtccgccaagttccagggaagggcctggagtgggtctcagatattagttggaatagtggtagcaaagactatgcggactctgtgaagggccgcttcaccatctccagagacaacgccaagaatttcctgtatctgcaaatgaacagtctgagagctgaagacacggccttgtattactgtgtaaaatatggaagtggctacgggaaattctacttctacgctatggacgtctggggccaagggaccacggtcaccgtctcctca

SEQ ID NO: 1466 - protein, 124 aa, synthetic construct
  REGION 1..124: note = Description of Artificial Sequence: Synthetic polypeptide
EVQLVESGGGLVQPGRSLRLSCAASGFTFADYTMHWVRQVPGKGLEWVSDISWNSGSKDYADSVKGRFTISRDNAKNFLYLQMNSLRAEDTALYYCVKYGSGYGKFYFYAMDVWGQGTTVTVSS

SEQ ID NO: 1467 - DNA, 24 bp, synthetic construct
  misc_feature 1..24: note = Description of Artificial Sequence: Synthetic oligonucleotide
  source 1..24: mol_type = other DNA
ggattcacctttgctgattatacc

SEQ ID NO: 1468 - protein, 8 aa, synthetic construct
  REGION 1..8: note = Description of Artificial Sequence: Synthetic peptide
GFTFADYT

SEQ ID NO: 1469 - DNA, 24 bp, synthetic construct
  misc_feature 1..24: note = Description of Artificial Sequence: Synthetic oligonucleotide
  source 1..24: mol_type = other DNA
attagttggaatagtggtagcaaa

SEQ ID NO: 1470 - protein, 8 aa, synthetic construct
  REGION 1..8: note = Description of Artificial Sequence: Synthetic peptide
ISWNSGSK

SEQ ID NO: 1471 - DNA, 51 bp, synthetic construct
  misc_feature 1..51: note = Description of Artificial Sequence: Synthetic oligonucleotide
  source 1..51: mol_type = other DNA
gtaaaatatggaagtggctacgggaaattctacttctacgctatggacgtc

SEQ ID NO: 1472 - protein, 17 aa, synthetic construct
  REGION 1..17: note = Description of Artificial Sequence: Synthetic peptide
VKYGSGYGKFYFYAMDV

SEQ ID NO: 1473 - DNA, 372 bp, synthetic construct
  misc_feature 1..372: note = Description of Artificial Sequence: Synthetic polynucleotide
  source 1..372: mol_type = other DNA
gaggtgcagctggtgcagtctgggggaggcttggtacagcctggcaggtccctgagactctcctgtgcagcctctggattcacctttgctgattataccatgcactgggtccggcaaactccagggaagggcctggagtgggtctcaggtattagttggaatagtggtagcaaagactatgcggactctgtgaagggccgattcaccatctccagagacaacgccaagaactccctgtatctgcaaatgaacagtctgagaactgaggacacggccttgtattactgtgcaaaatatggaagtggctacgggagatatttcttctacgctatggacgtctggggccaagggaccacggtcaccgtctcctca

SEQ ID NO: 1474 - protein, 124 aa, synthetic construct
  REGION 1..124: note = Description of Artificial Sequence: Synthetic polypeptide
EVQLVQSGGGLVQPGRSLRLSCAASGFTFADYTMHWVRQTPGKGLEWVSGISWNSGSKDYADSVKGRFTISRDNAKNSLYLQMNSLRTEDTALYYCAKYGSGYGRYFFYAMDVWGQGTTVTVSS

SEQ ID NO: 1475 - DNA, 24 bp, synthetic construct
  misc_feature 1..24: note = Description of Artificial Sequence: Synthetic oligonucleotide
  source 1..24: mol_type = other DNA
ggattcacctttgctgattatacc

SEQ ID NO: 1476 - protein, 8 aa, synthetic construct
  REGION 1..8: note = Description of Artificial Sequence: Synthetic peptide
GFTFADYT

SEQ ID NO: 1477 - DNA, 24 bp, synthetic construct
  misc_feature 1..24: note = Description of Artificial Sequence: Synthetic oligonucleotide
  source 1..24: mol_type = other DNA
attagttggaatagtggtagcaaa

SEQ ID NO: 1478 - protein, 8 aa, synthetic construct
  REGION 1..8: note = Description of Artificial Sequence: Synthetic peptide
ISWNSGSK

SEQ ID NO: 1479 - DNA, 51 bp, synthetic construct
  misc_feature 1..51: note = Description of Artificial Sequence: Synthetic oligonucleotide
  source 1..51: mol_type = other DNA
gcaaaatatggaagtggctacgggagatatttcttctacgctatggacgtc

SEQ ID NO: 1480 - protein, 17 aa, synthetic construct
  REGION 1..17: note = Description of Artificial Sequence: Synthetic peptide
AKYGSGYGRYFFYAMDV

SEQ ID NO: 1481 - DNA, 372 bp, synthetic construct
  misc_feature 1..372: note = Description of Artificial Sequence: Synthetic polynucleotide
  source 1..372: mol_type = other DNA
gaggtgcagctggtggagtcaaggggagccttggtacagcctggcaggtccctgagactctcctgtgcagcctctggattcgcctttaatgattataccatgcactgggtccggcaagctccagggaagggcctggagtgggtctcagatattagttggaatagtaatagtaaagactatgcggactctgtgaagggccgattcaccatctccagagacaatgccaagaactccctctatctacaaatgaacagtctgagagctgaggacacggccttgtattactgtgtaaaagatggaagtggctacgggaaattttccctctacgctttggacgtctggggccaagggaccacggtcaccgtctcctca

SEQ ID NO: 1482 - protein, 124 aa, synthetic construct
  REGION 1..124: note = Description of Artificial Sequence: Synthetic polypeptide
EVQLVESRGALVQPGRSLRLSCAASGFAFNDYTMHWVRQAPGKGLEWVSDISWNSNSKDYADSVKGRFTISRDNAKNSLYLQMNSLRAEDTALYYCVKDGSGYGKFSLYALDVWGQGTTVTVSS

SEQ ID NO: 1483 - DNA, 24 bp, synthetic construct
  misc_feature 1..24: note = Description of Artificial Sequence: Synthetic oligonucleotide
  source 1..24: mol_type = other DNA
ggattcgcctttaatgattatacc

SEQ ID NO: 1484 - protein, 8 aa, synthetic construct
  REGION 1..8: note = Description of Artificial Sequence: Synthetic peptide
GFAFNDYT

SEQ ID NO: 1485 - DNA, 24 bp, synthetic construct
  misc_feature 1..24: note = Description of Artificial Sequence: Synthetic oligonucleotide
  source 1..24: mol_type = other DNA
attagttggaatagtaatagtaaa

SEQ ID NO: 1486 - protein, 8 aa, synthetic construct
  REGION 1..8: note = Description of Artificial Sequence: Synthetic peptide
ISWNSNSK

SEQ ID NO: 1487 - DNA, 51 bp, synthetic construct
  misc_feature 1..51: note = Description of Artificial Sequence: Synthetic oligonucleotide
  source 1..51: mol_type = other DNA
gtaaaagatggaagtggctacgggaaattttccctctacgctttggacgtc

SEQ ID NO: 1488 - protein, 17 aa, synthetic construct
  REGION 1..17: note = Description of Artificial Sequence: Synthetic peptide
VKDGSGYGKFSLYALDV

SEQ ID NO: 1489 - DNA, 372 bp, synthetic construct
  misc_feature 1..372: note = Description of Artificial Sequence: Synthetic polynucleotide
  source 1..372: mol_type = other DNA
caggtgcagctggtggagtctgggggaggcttggttcaccctggcaggtccctgagactctcctgtgcagcctctggattcaaatttgatgattataccatgcactgggtccggcaagctccagggaagggcctagagtgggtctcagatattagttggaatagtggtagtaaaggctatgcggactctgtgaagggccgattcaccatctccagagacaacgccaaggattccctatatctgcagatggacagtctgagagctgcagacacggccttctattactgtgcaaaagataaaagtggctacggccacttctactactacgctatggacgtctggggccaagggaccacggtcaccgtctcctca

SEQ ID NO: 1490 - protein, 124 aa, synthetic construct
  REGION 1..124: note = Description of Artificial Sequence: Synthetic polypeptide
QVQLVESGGGLVHPGRSLRLSCAASGFKFDDYTMHWVRQAPGKGLEWVSDISWNSGSKGYADSVKGRFTISRDNAKDSLYLQMDSLRAADTAFYYCAKDKSGYGHFYYYAMDVWGQGTTVTVSS

SEQ ID NO: 1491 - DNA, 24 bp, synthetic construct
  misc_feature 1..24: note = Description of Artificial Sequence: Synthetic oligonucleotide
  source 1..24: mol_type = other DNA
ggattcaaatttgatgattatacc

SEQ ID NO: 1492 - protein, 8 aa, synthetic construct
  REGION 1..8: note = Description of Artificial Sequence: Synthetic peptide
GFKFDDYT

SEQ ID NO: 1493 - DNA, 24 bp, synthetic construct
  misc_feature 1..24: note = Description of Artificial Sequence: Synthetic oligonucleotide
  source 1..24: mol_type = other DNA
attagttggaatagtggtagtaaa

SEQ ID NO: 1494 - protein, 8 aa, synthetic construct
  REGION 1..8: note = Description of Artificial Sequence: Synthetic peptide
ISWNSGSK

SEQ ID NO: 1495 - DNA, 51 bp, synthetic construct
  misc_feature 1..51: note = Description of Artificial Sequence: Synthetic oligonucleotide
  source 1..51: mol_type = other DNA
gcaaaagataaaagtggctacggccacttctactactacgctatggacgtc

SEQ ID NO: 1496 - protein, 17 aa, synthetic construct
  REGION 1..17: note = Description of Artificial Sequence: Synthetic peptide
AKDKSGYGHFYYYAMDV

SEQ ID NO: 1497 - DNA, 372 bp, synthetic construct
  misc_feature 1..372: note = Description of Artificial Sequence: Synthetic polynucleotide
  source 1..372: mol_type = other DNA
gaggtgcagctggtggagtctgggggaggcttggtacaccctggcaggtccctaagactctcctgtacagcctctggattcaagtttgctgattataccatgcactgggtccggcaagctccagggaagggcctggagtgggtctcagatattagttggaatagtggtagtaaaggctatgcggactctgtaaagggccgattcaccatctccagagacaatgacaagaactccctgtatctgcaaatgaacagtctgagaggtgaggacacggccttgtattactgtgcaaaagatggaagtggctacgggaggttccacttctacgctatcgacgtctggggccaagggaccacggtcaccgtctcctca

SEQ ID NO: 1498 - protein, 124 aa, synthetic construct
  REGION 1..124: note = Description of Artificial Sequence: Synthetic polypeptide
EVQLVESGGGLVHPGRSLRLSCTASGFKFADYTMHWVRQAPGKGLEWVSDISWNSGSKGYADSVKGRFTISRDNDKNSLYLQMNSLRGEDTALYYCAKDGSGYGRFHFYAIDVWGQGTTVTVSS

SEQ ID NO: 1499 - DNA, 24 bp, synthetic construct
  misc_feature 1..24: note = Description of Artificial Sequence: Synthetic oligonucleotide
  source 1..24: mol_type = other DNA
ggattcaagtttgctgattatacc

SEQ ID NO: 1500 - protein, 8 aa, synthetic construct
  REGION 1..8: note = Description of Artificial Sequence: Synthetic peptide
GFKFADYT

SEQ ID NO: 1501 - DNA, 24 bp, synthetic construct
  misc_feature 1..24: note = Description of Artificial Sequence: Synthetic oligonucleotide
  source 1..24: mol_type = other DNA
attagttggaatagtggtagtaaa

SEQ ID NO: 1502 - protein, 8 aa, synthetic construct
  REGION 1..8: note = Description of Artificial Sequence: Synthetic peptide
ISWNSGSK

SEQ ID NO: 1503 - DNA, 51 bp, synthetic construct
  misc_feature 1..51: note = Description of Artificial Sequence: Synthetic oligonucleotide
  source 1..51: mol_type = other DNA
gcaaaagatggaagtggctacgggaggttccacttctacgctatcgacgtc

SEQ ID NO: 1504 - protein, 17 aa, synthetic construct
  REGION 1..17: note = Description of Artificial Sequence: Synthetic peptide
AKDGSGYGRFHFYAIDV

SEQ ID NO: 1505 - DNA, 372 bp, synthetic construct
  misc_feature 1..372: note = Description of Artificial Sequence: Synthetic polynucleotide
  source 1..372: mol_type = other DNA
gaggtgcagctggtggagtctgggggaggcttggtacagcctggcaggtccctgagactctcctgtgtagcctctggattcacctttgatgattattccatgcactgggtccggcaagctccagggaagggcctggagtgggtctcaggtattagttggaatagtggtagcaaagactatgcggactctgtgaagggccgattcaccatctccagagacaacgccaagaactccctgtatctgcaaatgaacagtctgagagctgaagacacggccttgtattactgtgcaaaatatggaagtggctacgggaagttctaccactacggtttggacgtctggggccaagggaccacggtcaccgtctcctca

SEQ ID NO: 1506 - protein, 124 aa, synthetic construct
  REGION 1..124: note = Description of Artificial Sequence: Synthetic polypeptide
EVQLVESGGGLVQPGRSLRLSCVASGFTFDDYSMHWVRQAPGKGLEWVSGISWNSGSKDYADSVKGRFTISRDNAKNSLYLQMNSLRAEDTALYYCAKYGSGYGKFYHYGLDVWGQGTTVTVSS

SEQ ID NO: 1507 - DNA, 24 bp, synthetic construct
  misc_feature 1..24: note = Description of Artificial Sequence: Synthetic oligonucleotide
  source 1..24: mol_type = other DNA
ggattcacctttgatgattattcc

SEQ ID NO: 1508 - protein, 8 aa, synthetic construct
  REGION 1..8: note = Description of Artificial Sequence: Synthetic peptide
GFTFDDYS

SEQ ID NO: 1509 - DNA, 24 bp, synthetic construct
  misc_feature 1..24: note = Description of Artificial Sequence: Synthetic oligonucleotide
  source 1..24: mol_type = other DNA
attagttggaatagtggtagcaaa

SEQ ID NO: 1510 - protein, 8 aa, synthetic construct
  REGION 1..8: note = Description of Artificial Sequence: Synthetic peptide
ISWNSGSK

SEQ ID NO: 1511 - DNA, 51 bp, synthetic construct
  misc_feature 1..51: note = Description of Artificial Sequence: Synthetic oligonucleotide
  source 1..51: mol_type = other DNA
gcaaaatatggaagtggctacgggaagttctaccactacggtttggacgtc

SEQ ID NO: 1512 - protein, 17 aa, synthetic construct
  REGION 1..17: note = Description of Artificial Sequence: Synthetic peptide
AKYGSGYGKFYHYGLDV

SEQ ID NO: 1513 - DNA, 372 bp, synthetic construct
  misc_feature 1..372: note = Description of Artificial Sequence: Synthetic polynucleotide
  source 1..372: mol_type = other DNA
caggtgcagttggtggagtctgggggaggcttggtacagcctggcaggtccctgagactctcctgtgcagcctctggattcacctttgctgattataccatgcactgggtccggcaggctccagggaagggcctggagtgggtctcagatattagttggaatagtggtagcatgggctatgcggactctgtgaagggccgattcaccatctccagagacaacgccaagaaatccctgtatctgcaaatgaacagtctgagaactgaggacacggccttgtattactgtgcaaaagatggaagtggctacgggaaatacttcttctacgctatggacgtctggggccaagggaccacggtcaccgtctcctca

SEQ ID NO: 1514 - protein, 124 aa, synthetic construct
  REGION 1..124: note = Description of Artificial Sequence: Synthetic polypeptide
QVQLVESGGGLVQPGRSLRLSCAASGFTFADYTMHWVRQAPGKGLEWVSDISWNSGSMGYADSVKGRFTISRDNAKKSLYLQMNSLRTEDTALYYCAKDGSGYGKYFFYAMDVWGQGTTVTVSS

SEQ ID NO: 1515 - DNA, 24 bp, synthetic construct
  misc_feature 1..24: note = Description of Artificial Sequence: Synthetic oligonucleotide
  source 1..24: mol_type = other DNA
ggattcacctttgctgattatacc

SEQ ID NO: 1516 - protein, 8 aa, synthetic construct
  REGION 1..8: note = Description of Artificial Sequence: Synthetic peptide
GFTFADYT

SEQ ID NO: 1517 - DNA, 24 bp, synthetic construct
  misc_feature 1..24: note = Description of Artificial Sequence: Synthetic oligonucleotide
  source 1..24: mol_type = other DNA
attagttggaatagtggtagcatg

SEQ ID NO: 1518 - protein, 8 aa, synthetic construct
  REGION 1..8: note = Description of Artificial Sequence: Synthetic peptide
ISWNSGSM

SEQ ID NO: 1519 - DNA, 51 bp, synthetic construct
  misc_feature 1..51: note = Description of Artificial Sequence: Synthetic oligonucleotide
  source 1..51: mol_type = other DNA
gcaaaagatggaagtggctacgggaaatacttcttctacgctatggacgtc

SEQ ID NO: 1520 - protein, 17 aa, synthetic construct
  REGION 1..17: note = Description of Artificial Sequence: Synthetic peptide
AKDGSGYGKYFFYAMDV

SEQ ID NO: 1521 - DNA, 372 bp, synthetic construct
  misc_feature 1..372: note = Description of Artificial Sequence: Synthetic polynucleotide
  source 1..372: mol_type = other DNA
gaggtgcagctggtgcagtctgggggaggcttggtacagcctggcaggtccctgagactctcctgtgcagcctctggattcaccttttctgattatactatgcattgggtccggcaaggtccagggaagggcctggagtgggtctcagatattagttggaatagtggtagtaaaggctatacggactctgtgaagggccgattcaccatttccagagacaacgccaagaagtccctgtatctacaaatgaacagtctgagagctgaggacacggccttgtactactgtgtaaaagatggaagtggctacgggaaataccacttctacgctatggacgtctggggccaagggaccctggtcaccgtctcctca

SEQ ID NO: 1522 - protein, 124 aa, synthetic construct
  REGION 1..124: note = Description of Artificial Sequence: Synthetic polypeptide
EVQLVQSGGGLVQPGRSLRLSCAASGFTFSDYTMHWVRQGPGKGLEWVSDISWNSGSKGYTDSVKGRFTISRDNAKKSLYLQMNSLRAEDTALYYCVKDGSGYGKYHFYAMDVWGQGTLVTVSS

SEQ ID NO: 1523 - DNA, 24 bp, synthetic construct
  misc_feature 1..24: note = Description of Artificial Sequence: Synthetic oligonucleotide
  source 1..24: mol_type = other DNA
ggattcaccttttctgattatact

SEQ ID NO: 1524 - protein, 8 aa, synthetic construct
  REGION 1..8: note = Description of Artificial Sequence: Synthetic peptide
GFTFSDYT

SEQ ID NO: 1525 - DNA, 24 bp, synthetic construct
  misc_feature 1..24: note = Description of Artificial Sequence: Synthetic oligonucleotide
  source 1..24: mol_type = other DNA
attagttggaatagtggtagtaaa

SEQ ID NO: 1526 - protein, 8 aa, synthetic construct
  REGION 1..8: note = Description of Artificial Sequence: Synthetic peptide
ISWNSGSK

SEQ ID NO: 1527 - DNA, 51 bp, synthetic construct
  misc_feature 1..51: note = Description of Artificial Sequence: Synthetic oligonucleotide
  source 1..51: mol_type = other DNA
gtaaaagatggaagtggctacgggaaataccacttctacgctatggacgtc

SEQ ID NO: 1528 - protein, 17 aa, synthetic construct
  REGION 1..17: note = Description of Artificial Sequence: Synthetic peptide
VKDGSGYGKYHFYAMDV

SEQ ID NO: 1529 - DNA, 372 bp, synthetic construct
  misc_feature 1..372: note = Description of Artificial Sequence: Synthetic polynucleotide
  source 1..372: mol_type = other DNA
gaggtgcagctggtggagtcggggggaggcttggttcaccctggcaggtccctgagactctcctgtgcagcctctggattcacctttgatgattataccatgcactgggtccggcaagctccagggaagggcctggaatgggtctcagatattagttggaatagtggtagcagaggctatgcggactctgtgaagggccgattcaccatctccagagataatgccgagaactccctgtacctgcaaatgaacagtctgagagctgaggacacggccttgtattactgtgcaaaagataaaagtggctacggccactactactactacgctatggacgtctggggccaagggaccacggtcaccgtctcctca

SEQ ID NO: 1530 - protein, 124 aa, synthetic construct
  REGION 1..124: note = Description of Artificial Sequence: Synthetic polypeptide
EVQLVESGGGLVHPGRSLRLSCAASGFTFDDYTMHWVRQAPGKGLEWVSDISWNSGSRGYADSVKGRFTISRDNAENSLYLQMNSLRAEDTALYYCAKDKSGYGHYYYYAMDVWGQGTTVTVSS

SEQ ID NO: 1531 - DNA, 24 bp, synthetic construct
  misc_feature 1..24: note = Description of Artificial Sequence: Synthetic oligonucleotide
  source 1..24: mol_type = other DNA
ggattcacctttgatgattatacc

SEQ ID NO: 1532 - protein, 8 aa, synthetic construct
  REGION 1..8: note = Description of Artificial Sequence: Synthetic peptide
GFTFDDYT

SEQ ID NO: 1533 - DNA, 24 bp, synthetic construct
  misc_feature 1..24: note = Description of Artificial Sequence: Synthetic oligonucleotide
  source 1..24: mol_type = other DNA
attagttggaatagtggtagcaga

SEQ ID NO: 1534 - protein, 8 aa, synthetic construct
  REGION 1..8: note = Description of Artificial Sequence: Synthetic peptide
ISWNSGSR

SEQ ID NO: 1535 - DNA, 51 bp, synthetic construct
  misc_feature 1..51: note = Description of Artificial Sequence: Synthetic oligonucleotide
  source 1..51: mol_type = other DNA
gcaaaagataaaagtggctacggccactactactactacgctatggacgtc

SEQ ID NO: 1536 - protein, 17 aa, synthetic construct
  REGION 1..17: note = Description of Artificial Sequence: Synthetic peptide
AKDKSGYGHYYYYAMDV

SEQ ID NO: 1537 - DNA, 372 bp, synthetic construct
  misc_feature 1..372: note = Description of Artificial Sequence: Synthetic polynucleotide
  source 1..372: mol_type = other DNA
gaggtgcagctggtggagtctgggggaggcttggtacagcctggcgggtccctgagactctcctgtgaagcctctggattcacctttgctgattataccttgcactgggtccggcaagctccagggaagggcctggaatgggtctcagatattagttggaatagtggcaccagaggctatgcggactctgtgaggggccgattcaccatctccagagacaacgccaagaagtccctgtatctgcaaatgaacagtctgagatctgaggacacggccttgtattactgtgtgaaagatggaagtggctacgggagatataatttctacgctatggacgtctggggccaagggaccacggtcaccgtctcctca

SEQ ID NO: 1538 - protein, 124 aa, synthetic construct
  REGION 1..124: note = Description of Artificial Sequence: Synthetic polypeptide
EVQLVESGGGLVQPGGSLRLSCEASGFTFADYTLHWVRQAPGKGLEWVSDISWNSGTRGYADSVRGRFTISRDNAKKSLYLQMNSLRSEDTALYYCVKDGSGYGRYNFYAMDVWGQGTTVTVSS

SEQ ID NO: 1539 - DNA, 24 bp, synthetic construct
  misc_feature 1..24: note = Description of Artificial Sequence: Synthetic oligonucleotide
  source 1..24: mol_type = other DNA
ggattcacctttgctgattatacc

SEQ ID NO: 1540 - protein, 8 aa, synthetic construct
  REGION 1..8: note = Description of Artificial Sequence: Synthetic peptide
GFTFADYT

SEQ ID NO: 1541 - DNA, 24 bp, synthetic construct
  misc_feature 1..24: note = Description of Artificial Sequence: Synthetic oligonucleotide
  source 1..24: mol_type = other DNA
attagttggaatagtggcaccaga

SEQ ID NO: 1542 - protein, 8 aa, synthetic construct
  REGION 1..8: note = Description of Artificial Sequence: Synthetic peptide
ISWNSGTR

SEQ ID NO: 1543 - DNA, 51 bp, synthetic construct
  misc_feature 1..51: note = Description of Artificial Sequence: Synthetic oligonucleotide
  source 1..51: mol_type = other DNA
gtgaaagatggaagtggctacgggagatataatttctacgctatggacgtc

SEQ ID NO: 1544 - protein, 17 aa, synthetic construct
  REGION 1..17: note = Description of Artificial Sequence: Synthetic peptide
VKDGSGYGRYNFYAMDV

SEQ ID NO: 1545 - DNA, 369 bp, synthetic construct
  misc_feature 1..369: note = Description of Artificial Sequence: Synthetic polynucleotide
  source 1..369: mol_type = other DNA
gaggtgcagctggtggagtctgggggaggcttggttcagcctggcaggtccctgagactctcctgtgcagcctctggatttacctttgctgactataccatgcactgggtccggcaaggtccagggaagggcctggagtgggtctcagatattggttggaatagtaatactataggctatgcggactctgtgaagggccgattcgccatctccagagacaacgccaagaactccctgtatcttcaaatgaacagtctgcgacctgaggacacggccttatattactgtgtaaaggataaaagtggctacgggaaattccaatacggtttggacgtctggggccaagggaccacggtcaccgtctcctca

SEQ ID NO: 1546 - protein, 123 aa, synthetic construct
  REGION 1..123: note = Description of Artificial Sequence: Synthetic polypeptide
EVQLVESGGGLVQPGRSLRLSCAASGFTFADYTMHWVRQGPGKGLEWVSDIGWNSNTIGYADSVKGRFAISRDNAKNSLYLQMNSLRPEDTALYYCVKDKSGYGKFQYGLDVWGQGTTVTVSS

SEQ ID NO: 1547 - DNA, 24 bp, synthetic construct
  misc_feature 1..24: note = Description of Artificial Sequence: Synthetic oligonucleotide
  source 1..24: mol_type = other DNA
ggatttacctttgctgactatacc

SEQ ID NO: 1548 - protein, 8 aa, synthetic construct
  REGION 1..8: note = Description of Artificial Sequence: Synthetic peptide
GFTFADYT

SEQ ID NO: 1549 - DNA, 24 bp, synthetic construct
  misc_feature 1..24: note = Description of Artificial Sequence: Synthetic oligonucleotide
  source 1..24: mol_type = other DNA
attggttggaatagtaatactata

SEQ ID NO: 1550 - protein, 8 aa, synthetic construct
  REGION 1..8: note = Description of Artificial Sequence: Synthetic peptide
IGWNSNTI

SEQ ID NO: 1551 - DNA, 48 bp, synthetic construct
  misc_feature 1..48: note = Description of Artificial Sequence: Synthetic oligonucleotide
  source 1..48: mol_type = other DNA
gtaaaggataaaagtggctacgggaaattccaatacggtttggacgtc

SEQ ID NO: 1552 - protein, 16 aa, synthetic construct
  REGION 1..16: note = Description of Artificial Sequence: Synthetic peptide
VKDKSGYGKFQYGLDV

SEQ ID NO: 1553 - DNA, 369 bp, synthetic construct
  misc_feature 1..369: note = Description of Artificial Sequence: Synthetic polynucleotide
  source 1..369: mol_type = other DNA
gaggtgcagctggtggagtctgggggaggcttggtacagcctggcaggtccctgagactctcctgtgcagcctctggatttacatttgacgattataccatgcactgggtccggcaaggtccagggaagggcctggagtgggtctcagatattggttggaatagtaacagtataggctatgcggactctgtgaagggccgattcaccatctccagagacaacgccaagaactccctgtatctccaaatgaacagtctgagacctgaggacacggccttgtatttctgtgtaaaggataaaagtggctacgggaaatttttcatcggtttggacgtctggggccaagggacaatggtcaccgtctcttca

SEQ ID NO: 1554 - protein, 123 aa, synthetic construct
  REGION 1..123: note = Description of Artificial Sequence: Synthetic polypeptide
EVQLVESGGGLVQPGRSLRLSCAASGFTFDDYTMHWVRQGPGKGLEWVSDIGWNSNSIGYADSVKGRFTISRDNAKNSLYLQMNSLRPEDTALYFCVKDKSGYGKFFIGLDVWGQGTMVTVSS

SEQ ID NO: 1555 - DNA, 24 bp, synthetic construct
  misc_feature 1..24: note = Description of Artificial Sequence: Synthetic oligonucleotide
  source 1..24: mol_type = other DNA
ggatttacatttgacgattatacc

SEQ ID NO: 1556 - protein, 8 aa, synthetic construct
  REGION 1..8: note = Description of Artificial Sequence: Synthetic peptide
GFTFDDYT

SEQ ID NO: 1557 - DNA, 24 bp, synthetic construct
  misc_feature 1..24: note = Description of Artificial Sequence: Synthetic oligonucleotide
  source 1..24: mol_type = other DNA
attggttggaatagtaacagtata

SEQ ID NO: 1558 - protein, 8 aa, synthetic construct
  REGION 1..8: note = Description of Artificial Sequence: Synthetic peptide
IGWNSNSI

SEQ ID NO: 1559 - DNA, 48 bp, synthetic construct
  misc_feature 1..48: note = Description of Artificial Sequence: Synthetic oligonucleotide
  source 1..48: mol_type = other DNA
gtaaaggataaaagtggctacgggaaatttttcatcggtttggacgtc

SEQ ID NO: 1560 - protein, 16 aa, synthetic construct
  REGION 1..16: note = Description of Artificial Sequence: Synthetic peptide
VKDKSGYGKFFIGLDV

SEQ ID NO: 1561 - DNA, 369 bp, synthetic construct
  misc_feature 1..369: note = Description of Artificial Sequence: Synthetic polynucleotide
  source 1..369: mol_type = other DNA
caggtgcagttggtggagtctgggggaggcttggtacagcctggcaggtccctgagactctcctgtgcagcctctggatttacatttgacgattataccatgcactgggtccggcaaggtccagggaagggcctggagtgggtctcagatattggttggaatagtaatactaaaggctatgcggactctgtgaagggccgattcaccatctccagagacaacgccaagaattccctgtatctccaaatgaacagtctgagacctgaggacacggccttgtatttctgtgtgaaggataaaagtggctacgggaaatttttcatcggtttggacgtctggggccaagggacaatggtcaccgtctcttca

SEQ ID NO: 1562 - protein, 123 aa, synthetic construct
  REGION 1..123: note = Description of Artificial Sequence: Synthetic polypeptide
QVQLVESGGGLVQPGRSLRLSCAASGFTFDDYTMHWVRQGPGKGLEWVSDIGWNSNTKGYADSVKGRFTISRDNAKNSLYLQMNSLRPEDTALYFCVKDKSGYGKFFIGLDVWGQGTMVTVSS

SEQ ID NO: 1563 - DNA, 24 bp, synthetic construct
  misc_feature 1..24: note = Description of Artificial Sequence: Synthetic oligonucleotide
  source 1..24: mol_type = other DNA
ggatttacatttgacgattatacc

SEQ ID NO: 1564 - protein, 8 aa, synthetic construct
  REGION 1..8: note = Description of Artificial Sequence: Synthetic peptide
GFTFDDYT

SEQ ID NO: 1565 - DNA, 24 bp, synthetic construct
  misc_feature 1..24: note = Description of Artificial Sequence: Synthetic oligonucleotide
  source 1..24: mol_type = other DNA
attggttggaatagtaatactaaa

SEQ ID NO: 1566 - protein, 8 aa, synthetic construct
  REGION 1..8: note = Description of Artificial Sequence: Synthetic peptide
IGWNSNTK

SEQ ID NO: 1567 - DNA, 48 bp, synthetic construct
  misc_feature 1..48: note = Description of Artificial Sequence: Synthetic oligonucleotide
  source 1..48: mol_type = other DNA
gtgaaggataaaagtggctacgggaaatttttcatcggtttggacgtc

SEQ ID NO: 1568 - protein, 16 aa, synthetic construct
  REGION 1..16: note = Description of Artificial Sequence: Synthetic peptide
VKDKSGYGKFFIGLDV

SEQ ID NO: 1569 - DNA, 369 bp, synthetic construct
  misc_feature 1..369: note = Description of Artificial Sequence: Synthetic polynucleotide
  source 1..369: mol_type = other DNA
gaggtgcagctggtggagtctgggggaggcttggtccagcctgggcggtccctgagactctcctgtgcagcctccggattcacctttgctgattataccatgcactgggtccggcaaggtccagggacgggcctggagtgggtctcagatattggttggagtggtggtagtttaggctatgcggactctgtgaagggccgattcaccatctccagagacaacgccaagaactccctgtatttggaaatgaacaatctgcgacctgaagacacggccttgtattattgtgtaaaggataaaagtggctacgggaaattccagtacggtttggacgtctggggccaagggaccacggtcaccgtctcctca

SEQ ID NO: 1570 - protein, 123 aa, synthetic construct
  REGION 1..123: note = Description of Artificial Sequence: Synthetic polypeptide
EVQLVESGGGLVQPGRSLRLSCAASGFTFADYTMHWVRQGPGTGLEWVSDIGWSGGSLGYADSVKGRFTISRDNAKNSLYLEMNNLRPEDTALYYCVKDKSGYGKFQYGLDVWGQGTTVTVSS

SEQ ID NO: 1571 - DNA, 24 bp, synthetic construct
  misc_feature 1..24: note = Description of Artificial Sequence: Synthetic oligonucleotide
  source 1..24: mol_type = other DNA
ggattcacctttgctgattatacc

SEQ ID NO: 1572 - protein, 8 aa, synthetic construct
  REGION 1..8: note = Description of Artificial Sequence: Synthetic peptide
GFTFADYT

SEQ ID NO: 1573 - DNA, 24 bp, synthetic construct
  misc_feature 1..24: note = Description of Artificial Sequence: Synthetic oligonucleotide
  source 1..24: mol_type = other DNA
attggttggagtggtggtagttta

SEQ ID NO: 1574 - protein, 8 aa, synthetic construct
  REGION 1..8: note = Description of Artificial Sequence: Synthetic peptide
IGWSGGSL

SEQ ID NO: 1575 - DNA, 48 bp, synthetic construct
  misc_feature 1..48: note = Description of Artificial Sequence: Synthetic oligonucleotide
  source 1..48: mol_type = other DNA
gtaaaggataaaagtggctacgggaaattccagtacggtttggacgtc

SEQ ID NO: 1576 - protein, 16 aa, synthetic construct
  REGION 1..16: note = Description of Artificial Sequence: Synthetic peptide
VKDKSGYGKFQYGLDV

SEQ ID NO: 1577 - DNA, 369 bp, synthetic construct
  misc_feature 1..369: note = Description of Artificial Sequence: Synthetic polynucleotide
  source 1..369: mol_type = other DNA
gaggtgcagctggtggagtctgggggaggcgtggtacagcctggcaggtccctgagactctcctgtgcagcctctgggtttaaatttgatggttataccatgcactgggtccggcaaggtccagggaagggcctggagtgggtctcagatattggttggaatagtaacactataggctatgcggactctgtgaagggccgattcaccatctccagagacaacgccaagaactccctgtatctccaaatgaacagtctgagaccagaggacacggccttgtatttctgtgtaaaggataaaagtggctacgggaaatttttcatcggtttggacgtctggggccaagggacaatggtcaccgtctcttca

SEQ ID NO: 1578 - protein, 123 aa, synthetic construct
  REGION 1..123: note = Description of Artificial Sequence: Synthetic polypeptide
EVQLVESGGGVVQPGRSLRLSCAASGFKFDGYTMHWVRQGPGKGLEWVSDIGWNSNTIGYADSVKGRFTISRDNAKNSLYLQMNSLRPEDTALYFCVKDKSGYGKFFIGLDVWGQGTMVTVSS

SEQ ID NO: 1579 - DNA, 24 bp, synthetic construct
  misc_feature 1..24: note = Description of Artificial Sequence: Synthetic oligonucleotide
  source 1..24: mol_type = other DNA
gggtttaaatttgatggttatacc

SEQ ID NO: 1580 - protein, 8 aa, synthetic construct
  REGION 1..8: note = Description of Artificial Sequence: Synthetic peptide
GFKFDGYT

SEQ ID NO: 1581 - DNA, 24 bp, synthetic construct
  misc_feature 1..24: note = Description of Artificial Sequence: Synthetic oligonucleotide
  source 1..24: mol_type = other DNA
attggttggaatagtaacactata

SEQ ID NO: 1582 - protein, 8 aa, synthetic construct
  REGION 1..8: note = Description of Artificial Sequence: Synthetic peptide
IGWNSNTI

SEQ ID NO: 1583 - DNA, 48 bp, synthetic construct; identical to SEQ ID NO: 1559
  misc_feature 1..48: note = Description of Artificial Sequence: Synthetic oligonucleotide
  source 1..48: mol_type = other DNA

SEQ ID NO: 1584 - protein, 16 aa, synthetic construct
  REGION 1..16: note = Description of Artificial Sequence: Synthetic peptide
VKDKSGYGKFFIGLDV

SEQ ID NO: 1585 - DNA, 369 bp, synthetic construct
  misc_feature 1..369: note = Description of Artificial Sequence: Synthetic polynucleotide
  source 1..369: mol_type = other DNA
caggtgcagctggtggagtctgggggaggcttggtacagcctggcaggtccctgagactctcctgtgcagcctctggattcacctttgatgattataccatgcactgggtccggcaaggtccagggaagggcctggagtgggtctcagatattggttggaatagtaatactataggctatgcggactctgtgaagggccgattcaccatctccagagacaacgccaggaactccctgtatctgcaaatgaacagtctgcgacctgaagacacggccttatattactgtgtaaaggataaaagtggctacgggaaattccaatacggtttggacgtctggggccaagggaccacggtcaccgtctcctca

SEQ ID NO: 1586 - protein, 123 aa, synthetic construct
  REGION 1..123: note = Description of Artificial Sequence: Synthetic polypeptide
QVQLVESGGGLVQPGRSLRLSCAASGFTFDDYTMHWVRQGPGKGLEWVSDIGWNSNTIGYADSVKGRFTISRDNARNSLYLQMNSLRPEDTALYYCVKDKSGYGKFQYGLDVWGQGTTVTVSS

SEQ ID NO: 1587 - DNA, 24 bp, synthetic construct
  misc_feature 1..24: note = Description of Artificial Sequence: Synthetic oligonucleotide
  source 1..24: mol_type = other DNA
ggattcacctttgatgattatacc

SEQ ID NO: 1588 - protein, 8 aa, synthetic construct
  REGION 1..8: note = Description of Artificial Sequence: Synthetic peptide
GFTFDDYT

SEQ ID NO: 1589 - DNA, 24 bp, synthetic construct
  misc_feature 1..24: note = Description of Artificial Sequence: Synthetic oligonucleotide
  source 1..24: mol_type = other DNA
attggttggaatagtaatactata

SEQ ID NO: 1590 - protein, 8 aa, synthetic construct
  REGION 1..8: note = Description of Artificial Sequence: Synthetic peptide
IGWNSNTI

SEQ ID NO: 1591 - DNA, 48 bp, synthetic construct; identical to SEQ ID NO: 1551
  misc_feature 1..48: note = Description of Artificial Sequence: Synthetic oligonucleotide
  source 1..48: mol_type = other DNA

SEQ ID NO: 1592 - protein, 16 aa, synthetic construct
  REGION 1..16: note = Description of Artificial Sequence: Synthetic peptide
VKDKSGYGKFQYGLDV

SEQ ID NO: 1593 - DNA, 369 bp, synthetic construct
  misc_feature 1..369: note = Description of Artificial Sequence: Synthetic polynucleotide
  source 1..369: mol_type = other DNA
caggtgcaactggtggagtctgggggaggcttggtacagcctggcaggtccctgagactctcctgtgcagcctctggattcaagtttgatgattataccatgcactgggtccggcaaggtccagggaagggcctggagtgggtctcagacattagttggagtggtggtagcatagactatacggactctgtgaagggccgattctccatctccagagacaacgccaagaactccctgtatctgcaaatgaacagtctgagagttgaagacacggccttgtattattgtgtaaaagataaaagtggctacgggaagtactcttacggtttggacgtctggggccaagggaccacggtcaccgtctcctca

SEQ ID NO: 1594 - protein, 123 aa, synthetic construct
  REGION 1..123: note = Description of Artificial Sequence: Synthetic polypeptide
QVQLVESGGGLVQPGRSLRLSCAASGFKFDDYTMHWVRQGPGKGLEWVSDISWSGGSIDYTDSVKGRFSISRDNAKNSLYLQMNSLRVEDTALYYCVKDKSGYGKYSYGLDVWGQGTTVTVSS

SEQ ID NO: 1595 - DNA, 24 bp, synthetic construct
  misc_feature 1..24: note = Description of Artificial Sequence: Synthetic oligonucleotide
  source 1..24: mol_type = other DNA
ggattcaagtttgatgattatacc

SEQ ID NO: 1596 - protein, 8 aa, synthetic construct
  REGION 1..8: note = Description of Artificial Sequence: Synthetic peptide
GFKFDDYT

SEQ ID NO: 1597 - DNA, 24 bp, synthetic construct
  misc_feature 1..24: note = Description of Artificial Sequence: Synthetic oligonucleotide
  source 1..24: mol_type = other DNA
attagttggagtggtggtagcata

SEQ ID NO: 1598 - protein, 8 aa, synthetic construct
  REGION 1..8: note = Description of Artificial Sequence: Synthetic peptide
ISWSGGSI

SEQ ID NO: 1599 - DNA, 48 bp, synthetic construct
  misc_feature 1..48: note = Description of Artificial Sequence: Synthetic oligonucleotide
  source 1..48: mol_type = other DNA
gtaaaagataaaagtggctacgggaagtactcttacggtttggacgtc

SEQ ID NO: 1600 - protein, 16 aa, synthetic construct
  REGION 1..16: note = Description of Artificial Sequence: Synthetic peptide
VKDKSGYGKYSYGLDV

SEQ ID NO: 1601 - DNA, 357 bp, synthetic construct
  misc_feature 1..357: note = Description of Artificial Sequence: Synthetic polynucleotide
  source 1..357: mol_type = other DNA
gaggtgcagctggtggagtctgggggaggcttggtaaagccgggggggtcccttagaatctcctgtgcagcctctggattctctttcattaacgcctggatgaactgggtccgccaggctccagggaaggggctggagtgggttggccgtattaaaagcataagtgatggtgggacaacagactacgctgcatccgtgaaaggcagattcaccatctcaagagaagattcaaaaaatatgctgtttctggaaatgaatagtctgaaaaccgaggacacagccgtgttttactgtaccacagaggtcgctagaactccgaactactggggccggggaaccctggtcaccgtctcctca

SEQ ID NO: 1602 - protein, 119 aa, synthetic construct
  REGION 1..119: note = Description of Artificial Sequence: Synthetic polypeptide
EVQLVESGGGLVKPGGSLRISCAASGFSFINAWMNWVRQAPGKGLEWVGRIKSISDGGTTDYAASVKGRFTISREDSKNMLFLEMNSLKTEDTAVFYCTTEVARTPNYWGRGTLVTVSS

SEQ ID NO: 1603 - DNA, 24 bp, synthetic construct
  misc_feature 1..24: note = Description of Artificial Sequence: Synthetic oligonucleotide
  source 1..24: mol_type = other DNA
ggattctctttcattaacgcctgg

SEQ ID NO: 1604 - protein, 8 aa, synthetic construct
  REGION 1..8: note = Description of Artificial Sequence: Synthetic peptide
GFSFINAW

SEQ ID NO: 1605 - DNA, 30 bp, synthetic construct
  misc_feature 1..30: note = Description of Artificial Sequence: Synthetic oligonucleotide
  source 1..30: mol_type = other DNA
attaaaagcataagtgatggtgggacaaca

SEQ ID NO: 1606 - protein, 10 aa, synthetic construct
  REGION 1..10: note = Description of Artificial Sequence: Synthetic peptide
IKSISDGGTT

SEQ ID NO: 1607 - DNA, 30 bp, synthetic construct
  misc_feature 1..30: note = Description of Artificial Sequence: Synthetic oligonucleotide
  source 1..30: mol_type = other DNA
accacagaggtcgctagaactccgaactac

SEQ ID NO: 1608 - protein, 10 aa, synthetic construct
  REGION 1..10: note = Description of Artificial Sequence: Synthetic peptide
TTEVARTPNY

SEQ ID NO: 1609 - DNA, 372 bp, synthetic construct
  misc_feature 1..372: note = Description of Artificial Sequence: Synthetic polynucleotide
  source 1..372: mol_type = other DNA
gaagtacagcttgtagaatccggcggaggactggtacaacctggaagaagtcttagactgagttgcgcagctagtgggtttacattcgacgattacagcatgcattgggtgaggcaagctcctggtaaaggattggaatgggttagcgggatatcatggaactcaggaagcaagggatacgccgacagcgtgaaaggccgatttacaatatctagggacaacgcaaaaaactctctctaccttcaaatgaactctcttagggcagaagacacagcattgtattattgcgcaaaatacggcagtggttatggcaagttttatcattatggactggacgtgtggggacaagggacaacagtgacagtgagtagc

SEQ ID NO: 1610 - protein, 124 aa, synthetic construct
  REGION 1..124: note = Description of Artificial Sequence: Synthetic polypeptide
EVQLVESGGGLVQPGRSLRLSCAASGFTFDDYSMHWVRQAPGKGLEWVSGISWNSGSKGYADSVKGRFTISRDNAKNSLYLQMNSLRAEDTALYYCAKYGSGYGKFYHYGLDVWGQGTTVTVSS

SEQ ID NO: 1611 - DNA, 24 bp, synthetic construct
  misc_feature 1..24: note = Description of Artificial Sequence: Synthetic oligonucleotide
  source 1..24: mol_type = other DNA
gggtttacattcgacgattacagc

SEQ ID NO: 1612 - protein, 8 aa, synthetic construct
  REGION 1..8: note = Description of Artificial Sequence: Synthetic peptide
GFTFDDYS

SEQ ID NO: 1613 - DNA, 24 bp, synthetic construct
  misc_feature 1..24: note = Description of Artificial Sequence: Synthetic oligonucleotide
  source 1..24: mol_type = other DNA
atatcatggaactcaggaagcaag

SEQ ID NO: 1614 - protein, 8 aa, synthetic construct
  REGION 1..8: note = Description of Artificial Sequence: Synthetic peptide
ISWNSGSK

SEQ ID NO: 1615 - DNA, 51 bp, synthetic construct
  misc_feature 1..51: note = Description of Artificial Sequence: Synthetic oligonucleotide
  source 1..51: mol_type = other DNA
gcaaaatacggcagtggttatggcaagttttatcattatggactggacgtg

SEQ ID NO: 1616 - protein, 17 aa, synthetic construct
  REGION 1..17: note = Description of Artificial Sequence: Synthetic peptide
AKYGSGYGKFYHYGLDV

SEQ ID NO: 1617 - DNA, 372 bp, synthetic construct
  misc_feature 1..372: note = Description of Artificial Sequence: Synthetic polynucleotide
  source 1..372: mol_type = other DNA
gaagtacaactggtcgaatctggaggaggtcttgttcaacctggtcgatcacttcgcctttcttgtgccgcttctggtttcactttcgacgattatagcatgcattgggtacgacaggctcccggaaaagggctggaatgggtgtcaggaattagttggaactcaggaagtattggatacgctgattcagtcaaaggacgcttcacaatctcaagggacaacgctaaaaactcactttatttgcaaatgaactctctccgcgctgaagataccgctctctattattgcgccaaagatgggtctggttacggttatttttactactatggaatggacgtttggggccaaggaacaactgtcacagtatcatcc

SEQ ID NO: 1618 - protein, 124 aa, synthetic construct
  REGION 1..124: note = Description of Artificial Sequence: Synthetic polypeptide
EVQLVESGGGLVQPGRSLRLSCAASGFTFDDYSMHWVRQAPGKGLEWVSGISWNSGSIGYADSVKGRFTISRDNAKNSLYLQMNSLRAEDTALYYCAKDGSGYGYFYYYGMDVWGQGTTVTVSS

SEQ ID NO: 1619 - DNA, 24 bp, synthetic construct
  misc_feature 1..24: note = Description of Artificial Sequence: Synthetic oligonucleotide
  source 1..24: mol_type = other DNA
ggtttcactttcgacgattatagc

SEQ ID NO: 1620 - protein, 8 aa, synthetic construct
  REGION 1..8: note = Description of Artificial Sequence: Synthetic peptide
GFTFDDYS

SEQ ID NO: 1621 - DNA, 24 bp, synthetic construct
  misc_feature 1..24: note = Description of Artificial Sequence: Synthetic oligonucleotide
  source 1..24: mol_type = other DNA
attagttggaactcaggaagtatt

SEQ ID NO: 1622 - protein, 8 aa, synthetic construct
  REGION 1..8: note = Description of Artificial Sequence: Synthetic peptide
ISWNSGSI

SEQ ID NO: 1623 - DNA, 51 bp, synthetic construct
  misc_feature 1..51: note = Description of Artificial Sequence: Synthetic oligonucleotide
  source 1..51: mol_type = other DNA
gccaaagatgggtctggttacggttatttttactactatggaatggacgtt

SEQ ID NO: 1624 - protein, 17 aa, synthetic construct
  REGION 1..17: note = Description of Artificial Sequence: Synthetic peptide
AKDGSGYGYFYYYGMDV

SEQ ID NO: 1625 - DNA, 372 bp, synthetic construct
  misc_feature 1..372: note = Description of Artificial Sequence: Synthetic polynucleotide
  source 1..372: mol_type = other DNA
gaagtgcaactcgttgaaagcggaggaggactggtccagcccggcagatctctcagattgtcttgcgctgcatccggatttacatttgacgactattcaatgcactgggtacggcaagccccaggtaaaggactcgaatgggtaagcggcatatcttggaactcaggcagtattggctacgcagattcagtaaaaggaagattcactatttcaagggataatgctaagaacagtctctacttgcaaatgaatagcttgcgcgcagaagatacagcactttattattgtgcaaaagatggaagcggttatgggaaattttattattatggtatggatgtatggggtcaaggtacaacagttactgtgtcaagt

SEQ ID NO: 1626 - protein, 124 aa, synthetic construct
  REGION 1..124: note = Description of Artificial Sequence: Synthetic polypeptide
EVQLVESGGGLVQPGRSLRLSCAASGFTFDDYSMHWVRQAPGKGLEWVSGISWNSGSIGYADSVKGRFTISRDNAKNSLYLQMNSLRAEDTALYYCAKDGSGYGKFYYYGMDVWGQGTTVTVSS

SEQ ID NO: 1627 - DNA, 24 bp, synthetic construct
  misc_feature 1..24: note = Description of Artificial Sequence: Synthetic oligonucleotide
  source 1..24: mol_type = other DNA
ggatttacatttgacgactattca

SEQ ID NO: 1628 - protein, 8 aa, synthetic construct
  REGION 1..8: note = Description of Artificial Sequence: Synthetic peptide
GFTFDDYS

SEQ ID NO: 1629 - DNA, 24 bp, synthetic construct
  misc_feature 1..24: note = Description of Artificial Sequence: Synthetic oligonucleotide
  source 1..24: mol_type = other DNA
atatcttggaactcaggcagtatt

SEQ ID NO: 1630 - protein, 8 aa, synthetic construct
  REGION 1..8: note = Description of Artificial Sequence: Synthetic peptide
ISWNSGSI

SEQ ID NO: 1631 - DNA, 51 bp, synthetic construct
  misc_feature 1..51: note = Description of Artificial Sequence: Synthetic oligonucleotide
  source 1..51: mol_type = other DNA
gcaaaagatggaagcggttatgggaaattttattattatggtatggatgta

SEQ ID NO: 1632 - protein, 17 aa, synthetic construct
  REGION 1..17: note = Description of Artificial Sequence: Synthetic peptide
AKDGSGYGKFYYYGMDV

SEQ ID NO: 1633 - DNA, 324 bp, synthetic construct; identical to SEQ ID NO: 57
  misc_feature 1..324: note = Description of Artificial Sequence: Synthetic polynucleotide
  source 1..324: mol_type = other DNA

SEQ ID NO: 1634 - protein, 108 aa, synthetic construct; identical to SEQ ID NO: 58
  REGION 1..108: note = Description of Artificial Sequence: Synthetic polypeptide

SEQ ID NO: 1635 - DNA, 18 bp, synthetic construct
  misc_feature 1..18: note = Description of Artificial Sequence: Synthetic oligonucleotide
  source 1..18: mol_type = other DNA
cagagcattagcagctat

SEQ ID NO: 1636 - protein, 6 aa, synthetic construct
  REGION 1..6: note = Description of Artificial Sequence: Synthetic peptide
QSISSY

SEQ ID NO: 1637-1638 - skipped (2 entries)

SEQ ID NO: 1639 - DNA, 30 bp, synthetic construct; identical to SEQ ID NO: 15
  misc_feature 1..30: note = Description of Artificial Sequence: Synthetic oligonucleotide
  source 1..30: mol_type = other DNA

SEQ ID NO: 1640 - protein, 10 aa, synthetic construct
  REGION 1..10: note = Description of Artificial Sequence: Synthetic peptide
QQSYSTPPIT

SEQ ID NO: 1641 - DNA, 369 bp, synthetic construct; identical to SEQ ID NO: 513
  misc_feature 1..369: note = Description of Artificial Sequence: Synthetic polynucleotide
  source 1..369: mol_type = other DNA

SEQ ID NO: 1642 - protein, 123 aa, synthetic construct; identical to SEQ ID NO: 514
  REGION 1..123: note = Description of Artificial Sequence: Synthetic polypeptide

SEQ ID NO: 1643 - DNA, 24 bp, synthetic construct
  misc_feature 1..24: note = Description of Artificial Sequence: Synthetic oligonucleotide
  source 1..24: mol_type = other DNA
ggattcacctttgatgattatacc

SEQ ID NO: 1644 - protein, 8 aa, synthetic construct
  REGION 1..8: note = Description of Artificial Sequence: Synthetic peptide
GFTFDDYT

SEQ ID NO: 1645 - DNA, 24 bp, synthetic construct
  misc_feature 1..24: note = Description of Artificial Sequence: Synthetic oligonucleotide
  source 1..24: mol_type = other DNA
attagttggaatagtggtagtata

SEQ ID NO: 1646 - protein, 8 aa, synthetic construct
  REGION 1..8: note = Description of Artificial Sequence: Synthetic peptide
ISWNSGSI

SEQ ID NO: 1647 - DNA, 48 bp, synthetic construct; identical to SEQ ID NO: 519
  misc_feature 1..48: note = Description of Artificial Sequence: Synthetic oligonucleotide
  source 1..48: mol_type = other DNA

SEQ ID NO: 1648 - protein, 16 aa, synthetic construct
  REGION 1..16: note = Description of Artificial Sequence: Synthetic peptide
AKDNSGYGHYYYGMDV

SEQ ID NO: 1649 - DNA, 320 bp, synthetic construct
  misc_feature 1..320: note = Description of Artificial Sequence: Synthetic polynucleotide
  source 1..320: mol_type = other DNA
gaaatagtgatgacgcagtctccagccaccctgtctgtgtctccaggggaaagagccaccctctcctgcagggccagtcagagtgttagcagcaacttagcctggtaccagcaaaaacctggccaggctcccaggctcctcatctatggtgcatccaccagggccactggtatcccagccaggttcagtggcagtgggtctgggacagagttcactctcaccatcagcagcctgcagtctgaagattttgcagtttattactgtcagcactatattaactggcctctcactttcggcggagggaccaaggtggagatcaa

SEQ ID NO: 1650 - protein, 108 aa, synthetic construct
  REGION 1..108: note = Description of Artificial Sequence: Synthetic polypeptide
AEIVMTQSPATLSVSPGERATLSCRASQSVSSNLAWYQQKPGQAPRLLIYGASTRATGIPARFSGSGSGTEFTLTISSLQSEDFAVYYCQHYINWPLTFGGGTKVEIK

SEQ ID NO: 1651 - DNA, 18 bp, synthetic construct
  misc_feature 1..18: note = Description of Artificial Sequence: Synthetic oligonucleotide
  source 1..18: mol_type = other DNA
cagagtgttagcagcaac

SEQ ID NO: 1652 - protein, 6 aa, synthetic construct
  REGION 1..6: note = Description of Artificial Sequence: Synthetic peptide
QSVSSN

SEQ ID NO: 1653-1654 - skipped (2 entries)

SEQ ID NO: 1655 - DNA, 27 bp, synthetic construct
  misc_feature 1..27: note = Description of Artificial Sequence: Synthetic oligonucleotide
  source 1..27: mol_type = other DNA
cagcactatattaactggcctctcact

SEQ ID NO: 1656 - protein, 9 aa, synthetic construct
  REGION 1..9: note = Description of Artificial Sequence: Synthetic peptide
QHYINWPLT

SEQ ID NO: 1657 - DNA, 369 bp, synthetic construct; identical to SEQ ID NO: 401
  misc_feature 1..369: note = Description of Artificial Sequence: Synthetic polynucleotide
  source 1..369: mol_type = other DNA

SEQ ID NO: 1658 - protein, 123 aa, synthetic construct; identical to SEQ ID NO: 402
  REGION 1..123: note = Description of Artificial Sequence: Synthetic polypeptide

SEQ ID NO: 1659 - DNA, 24 bp, synthetic construct
  misc_feature 1..24: note = Description of Artificial Sequence: Synthetic oligonucleotide
  source 1..24: mol_type = other DNA
ggattcacctttgatgattttacc

SEQ ID NO: 1660 - protein, 8 aa, synthetic construct
  REGION 1..8: note = Description of Artificial Sequence: Synthetic peptide
GFTFDDFT

SEQ ID NO: 1661 - DNA, 24 bp, synthetic construct
  misc_feature 1..24: note = Description of Artificial Sequence: Synthetic oligonucleotide
  source 1..24: mol_type = other DNA
atcagttggaatagtggtagcata

SEQ ID NO: 1662 - protein, 8 aa, synthetic construct
  REGION 1..8: note = Description of Artificial Sequence: Synthetic peptide
ISWNSGSI

SEQ ID NO: 1663 - DNA, 48 bp, synthetic construct; identical to SEQ ID NO: 407
  misc_feature 1..48: note = Description of Artificial Sequence: Synthetic oligonucleotide
  source 1..48: mol_type = other DNA

SEQ ID NO: 1664 - protein, 16 aa, synthetic construct
  REGION 1..16: note = Description of Artificial Sequence: Synthetic peptide
AKDNSGYGYYYYGMDV

SEQ ID NO: 1665 - DNA, 321 bp, synthetic construct; identical to SEQ ID NO: 409
  misc_feature 1..321: note = Description of Artificial Sequence: Synthetic polynucleotide
  source 1..321: mol_type = other DNA

SEQ ID NO: 1666 - protein, 107 aa, synthetic construct; identical to SEQ ID NO: 410
  REGION 1..107: note = Description of Artificial Sequence: Synthetic polypeptide

SEQ ID NO: 1667 - DNA, 18 bp, synthetic construct
  misc_feature 1..18: note = Description of Artificial Sequence: Synthetic oligonucleotide
  source 1..18: mol_type = other DNA
cacagtgttagcaggaac

SEQ ID NO: 1668 - protein, 6 aa, synthetic construct
  REGION 1..6: note = Description of Artificial Sequence: Synthetic peptide
HSVSRN

SEQ ID NO: 1669-1670 - skipped (2 entries)

SEQ ID NO: 1671 - DNA, 27 bp, synthetic construct
  misc_feature 1..27: note = Description of Artificial Sequence: Synthetic oligonucleotide
  source 1..27: mol_type = other DNA
cagcagtataataattggcctctcact

SEQ ID NO: 1672 - protein, 9 aa, synthetic construct
  REGION 1..9: note = Description of Artificial Sequence: Synthetic peptide
QQYNNWPLT

SEQ ID NO: 1673 - DNA, 369 bp, synthetic construct; identical to SEQ ID NO: 513
  misc_feature 1..369: note = Description of Artificial Sequence: Synthetic polynucleotide
  source 1..369: mol_type = other DNA

SEQ ID NO: 1674 - protein, 123 aa, synthetic construct; identical to SEQ ID NO: 514
  REGION 1..123: note = Description of Artificial Sequence: Synthetic polypeptide

SEQ ID NO: 1675 - DNA, 24 bp, synthetic construct
  misc_feature 1..24: note = Description of Artificial Sequence: Synthetic oligonucleotide
  source 1..24: mol_type = other DNA
ggattcacctttgatgattatacc

SEQ ID NO: 1676 - protein, 8 aa, synthetic construct
  REGION 1..8: note = Description of Artificial Sequence: Synthetic peptide
GFTFDDYT

SEQ ID NO: 1677 - DNA, 24 bp, synthetic construct
  misc_feature 1..24: note = Description of Artificial Sequence: Synthetic oligonucleotide
  source 1..24: mol_type = other DNA
attagttggaatagtggtagtata

SEQ ID NO: 1678 - protein, 8 aa, synthetic construct
  REGION 1..8: note = Description of Artificial Sequence: Synthetic peptide
ISWNSGSI

SEQ ID NO: 1679 - DNA, 48 bp, synthetic construct; identical to SEQ ID NO: 519
  misc_feature 1..48: note = Description of Artificial Sequence: Synthetic oligonucleotide
  source 1..48: mol_type = other DNA

SEQ ID NO: 1680 - protein, 16 aa, synthetic construct
  REGION 1..16: note = Description of Artificial Sequence: Synthetic peptide
AKDNSGYGHYYYGMDV

SEQ ID NO: 1681 - DNA, 321 bp, synthetic construct; identical to SEQ ID NO: 521
  misc_feature 1..321: note = Description of Artificial Sequence: Synthetic polynucleotide
  source 1..321: mol_type = other DNA

SEQ ID NO: 1682 - protein, 107 aa, synthetic construct; identical to SEQ ID NO: 522
  REGION 1..107: note = Description of Artificial Sequence: Synthetic polypeptide

SEQ ID NO: 1683 - DNA, 18 bp, synthetic construct
  misc_feature 1..18: note = Description of Artificial Sequence: Synthetic oligonucleotide
  source 1..18: mol_type = other DNA
cagagtgttagcagcaac

SEQ ID NO: 1684 - protein, 6 aa, synthetic construct
  REGION 1..6: note = Description of Artificial Sequence: Synthetic peptide
QSVSSN

SEQ ID NO: 1685-1686 - skipped (2 entries)

SEQ ID NO: 1687 - DNA, 27 bp, synthetic construct
  misc_feature 1..27: note = Description of Artificial Sequence: Synthetic oligonucleotide
  source 1..27: mol_type = other DNA
cagcactatattaactggcctctcact

SEQ ID NO: 1688 - protein, 9 aa, synthetic construct
  REGION 1..9: note = Description of Artificial Sequence: Synthetic peptide
QHYINWPLT

SEQ ID NO: 1689 - DNA, 354 bp, synthetic construct; identical to SEQ ID NO: 577
  misc_feature 1..354: note = Description of Artificial Sequence: Synthetic polynucleotide
  source 1..354: mol_type = other DNA

SEQ ID NO: 1690 - protein, 118 aa, synthetic construct; identical to SEQ ID NO: 578
  REGION 1..118: note = Description of Artificial Sequence: Synthetic polypeptide

SEQ ID NO: 1691 - DNA, 24 bp, synthetic construct
  misc_feature 1..24: note = Description of Artificial Sequence: Synthetic oligonucleotide
  source 1..24: mol_type = other DNA
ggatttaccttcagaagttatgcc

SEQ ID NO: 1692 - protein, 8 aa, synthetic construct
  REGION 1..8: note = Description of Artificial Sequence: Synthetic peptide
GFTFRSYA

SEQ ID NO: 1693 - DNA, 24 bp, synthetic construct
  misc_feature 1..24: note = Description of Artificial Sequence: Synthetic oligonucleotide
  source 1..24: mol_type = other DNA
gtatactatgatggaaataatcaa

SEQ ID NO: 1694 - protein, 8 aa, synthetic construct
  REGION 1..8: note = Description of Artificial Sequence: Synthetic peptide
VYYDGNNQ

SEQ ID NO: 1695 - DNA, 33 bp, synthetic construct; identical to SEQ ID NO: 551
  misc_feature 1..33: note = Description of Artificial Sequence: Synthetic oligonucleotide
  source 1..33: mol_type = other DNA

SEQ ID NO: 1696 - protein, 11 aa, synthetic construct
  REGION 1..11: note = Description of Artificial Sequence: Synthetic peptide
ARGPGYNWLDP

SEQ ID NO: 1697 - DNA, 321 bp, synthetic construct; identical to SEQ ID NO: 585
  misc_feature 1..321: note = Description of Artificial Sequence: Synthetic polynucleotide
  source 1..321: mol_type = other DNA

SEQ ID NO: 1698 - protein, 107 aa, synthetic construct; identical to SEQ ID NO: 586
  REGION 1..107: note = Description of Artificial Sequence: Synthetic polypeptide

SEQ ID NO: 1699 - DNA, 18 bp, synthetic construct
  misc_feature 1..18: note = Description of Artificial Sequence: Synthetic oligonucleotide
  source 1..18: mol_type = other DNA
cagagtgttagcaggaac

SEQ ID NO: 1700 - protein, 6 aa, synthetic construct
  REGION 1..6: note = Description of Artificial Sequence: Synthetic peptide
QSVSRN

SEQ ID NO: 1701-1702 - skipped (2 entries)

SEQ ID NO: 1703 - DNA, 27 bp, synthetic construct
  misc_feature 1..27: note = Description of Artificial Sequence: Synthetic oligonucleotide
  source 1..27: mol_type = other DNA
cagcagtataataactggcctctcact

SEQ ID NO: 1704 - protein, 9 aa, synthetic construct
  REGION 1..9: note = Description of Artificial Sequence: Synthetic peptide
QQYNNWPLT

SEQ ID NO: 1705 - DNA, 354 bp, synthetic construct; identical to SEQ ID NO: 561
  misc_feature 1..354: note = Description of Artificial Sequence: Synthetic polynucleotide
  source 1..354: mol_type = other DNA

SEQ ID NO: 1706 - protein, 118 aa, synthetic construct; identical to SEQ ID NO: 562
  REGION 1..118: note = Description of Artificial Sequence: Synthetic polypeptide

SEQ ID NO: 1707 - DNA, 24 bp, synthetic construct
  misc_feature 1..24: note = Description of Artificial Sequence: Synthetic oligonucleotide
  source 1..24: mol_type = other DNA
ggattcaccttcagaagttatggc

SEQ ID NO: 1708 - protein, 8 aa, synthetic construct
  REGION 1..8: note = Description of Artificial Sequence: Synthetic peptide
GFTFRSYG

SEQ ID NO: 1709 - DNA, 24 bp, synthetic construct
  misc_feature 1..24: note = Description of Artificial Sequence: Synthetic oligonucleotide
  source 1..24: mol_type = other DNA
atttactatgatggtaagaataaa

SEQ ID NO: 1710 - protein, 8 aa, synthetic construct
  REGION 1..8: note = Description of Artificial Sequence: Synthetic peptide
IYYDGKNK

SEQ ID NO: 1711 - DNA, 33 bp, synthetic construct; identical to SEQ ID NO: 567
  misc_feature 1..33: note = Description of Artificial Sequence: Synthetic oligonucleotide
  source 1..33: mol_type = other DNA

SEQ ID NO: 1712 - protein, 11 aa, synthetic construct
  REGION 1..11: note = Description of Artificial Sequence: Synthetic peptide
ARGPGYNWLDP

SEQ ID NO: 1713 - DNA, 321 bp, synthetic construct; identical to SEQ ID NO: 569
  misc_feature 1..321: note = Description of Artificial Sequence: Synthetic polynucleotide
  source 1..321: mol_type = other DNA

SEQ ID NO: 1714 - protein, 107 aa, synthetic construct; identical to SEQ ID NO: 570
  REGION 1..107: note = Description of Artificial Sequence: Synthetic polypeptide

SEQ ID NO: 1715 - DNA, 18 bp, synthetic construct
  misc_feature 1..18: note = Description of Artificial Sequence: Synthetic oligonucleotide
  source 1..18: mol_type = other DNA
cagagaattagcagcaac

SEQ ID NO: 1716 - protein, 6 aa, synthetic construct
  REGION 1..6: note = Description of Artificial Sequence: Synthetic peptide
QRISSN

SEQ ID NO: 1717-1718 - skipped (2 entries)

SEQ ID NO: 1719 - DNA, 27 bp, synthetic construct
  misc_feature 1..27: note = Description of Artificial Sequence: Synthetic oligonucleotide
  source 1..27: mol_type = other DNA
cagcaacatcataactggcctctcact

SEQ ID NO: 1720 - protein, 9 aa, synthetic construct
  REGION 1..9: note = Description of Artificial Sequence: Synthetic peptide
QQHHNWPLT

SEQ ID NO: 1721 - protein, 119 aa, synthetic construct
  REGION 1..119: note = Description of Artificial Sequence: Synthetic polypeptide
DVQLVQSGAEVKKPGASVKVSCKASGYTFTRYTMHWVRQAPGQGLEWIGYINPSRGYTNYADSVKGRFTITTDKSTSTAYMELSSLRSEDTATYYCARYYDDHYCLDYWGQGTTVTVSS

SEQ ID NO: 1722 - protein, 8 aa, synthetic construct
  REGION 1..8: note = Description of Artificial Sequence: Synthetic peptide
GYTFTRYT

SEQ ID NO: 1723 - protein, 8 aa, synthetic construct
  REGION 1..8: note = Description of Artificial Sequence: Synthetic peptide
INPSRGYT

SEQ ID NO: 1724 - protein, 12 aa, synthetic construct
  REGION 1..12: note = Description of Artificial Sequence: Synthetic peptide
ARYYDDHYCLDY

SEQ ID NO: 1725 - protein, 106 aa, synthetic construct
  REGION 1..106: note = Description of Artificial Sequence: Synthetic polypeptide
DIVLTQSPATLSLSPGERATLSCRASQSVSYMNWYQQKPGKAPKRWIYDTSKVASGVPARFSGSGSGTDYSLTINSLEAEDAATYYCQQWSSNPLTFGGGTKVEIK

SEQ ID NO: 1726 - protein, 11 aa, synthetic construct
  REGION 1..11: note = Description of Artificial Sequence: Synthetic peptide
LSCRASQSVSY

SEQ ID NO: 1727 - skipped

SEQ ID NO: 1728 - protein, 9 aa, synthetic construct
  REGION 1..9: note = Description of Artificial Sequence: Synthetic peptide
QQWSSNPLT

SEQ ID NO: 1729 - DNA, 372 bp, synthetic construct; identical to SEQ ID NO: 1609
  misc_feature 1..372: note = Description of Artificial Sequence: Synthetic polynucleotide
  source 1..372: mol_type = other DNA

SEQ ID NO: 1730 - protein, 124 aa, synthetic construct; identical to SEQ ID NO: 1610
  REGION 1..124: note = Description of Artificial Sequence: Synthetic polypeptide

SEQ ID NO: 1731 - DNA, 24 bp, synthetic construct
  misc_feature 1..24: note = Description of Artificial Sequence: Synthetic oligonucleotide
  source 1..24: mol_type = other DNA
gggtttacattcgacgattacagc

SEQ ID NO: 1732 - protein, 8 aa, synthetic construct
  REGION 1..8: note = Description of Artificial Sequence: Synthetic peptide
GFTFDDYS

SEQ ID NO: 1733 - DNA, 24 bp, synthetic construct
  misc_feature 1..24: note = Description of Artificial Sequence: Synthetic oligonucleotide
  source 1..24: mol_type = other DNA
atatcatggaactcaggaagcaag

SEQ ID NO: 1734 - protein, 8 aa, synthetic construct
  REGION 1..8: note = Description of Artificial Sequence: Synthetic peptide
ISWNSGSK

SEQ ID NO: 1735 - DNA, 51 bp, synthetic construct; identical to SEQ ID NO: 1615
  misc_feature 1..51: note = Description of Artificial Sequence: Synthetic oligonucleotide
  source 1..51: mol_type = other DNA

SEQ ID NO: 1736 - protein, 17 aa, synthetic construct
  REGION 1..17: note = Description of Artificial Sequence: Synthetic peptide
AKYGSGYGKFYHYGLDV

SEQ ID NO: 1737 - DNA, 372 bp, synthetic construct
  misc_feature 1..372: note = Description of Artificial Sequence: Synthetic polynucleotide
  source 1..372: mol_type = other DNA
gaagtacagttggtagaatctggaggaggactcgtgcaaccaggacgatcattgcggttgagttgtgctgctagtggattcacattcgacgactatgctatgcattgggtaagacaggctccaggaaaaggactcgaatgggtgtcaggaataagttggaactccggaagcattgggtacgcagattcagtcaaagggcgattcaccatatcccgagataacgctaagaactcactttaccttcaaatgaactctcttcgagcagaggacactgcactttattattgcgctaaggacggctccggttatggatatttttattattatggaatggacgtatggggacaaggcactactgttaccgttagttcc

SEQ ID NO: 1738 - protein, 124 aa, synthetic construct
  REGION 1..124: note = Description of Artificial Sequence: Synthetic polypeptide
EVQLVESGGGLVQPGRSLRLSCAASGFTFDDYAMHWVRQAPGKGLEWVSGISWNSGSIGYADSVKGRFTISRDNAKNSLYLQMNSLRAEDTALYYCAKDGSGYGYFYYYGMDVWGQGTTVTVSS

SEQ ID NO: 1739 - DNA, 24 bp, synthetic construct
  misc_feature 1..24: note = Description of Artificial Sequence: Synthetic oligonucleotide
  source 1..24: mol_type = other DNA
ggattcacattcgacgactatgct

SEQ ID NO: 1740 - protein, 8 aa, synthetic construct
  REGION 1..8: note = Description of Artificial Sequence: Synthetic peptide
GFTFDDYA

SEQ ID NO: 1741 - DNA, 24 bp, synthetic construct
  misc_feature 1..24: note = Description of Artificial Sequence: Synthetic oligonucleotide
  source 1..24: mol_type = other DNA
ataagttggaactccggaagcatt

SEQ ID NO: 1742 - protein, 8 aa, synthetic construct
  REGION 1..8: note = Description of Artificial Sequence: Synthetic peptide
ISWNSGSI

SEQ ID NO: 1743 - DNA, 51 bp, synthetic construct
  misc_feature 1..51: note = Description of Artificial Sequence: Synthetic oligonucleotide
  source 1..51: mol_type = other DNA
gctaaggacggctccggttatggatatttttattattatggaatggacgta

SEQ ID NO: 1744 - protein, 17 aa, synthetic construct
  REGION 1..17: note = Description of Artificial Sequence: Synthetic peptide
AKDGSGYGYFYYYGMDV

SEQ ID NO: 1745 - DNA, 372 bp, synthetic construct; identical to SEQ ID NO: 1617
  misc_feature 1..372: note = Description of Artificial Sequence: Synthetic polynucleotide
  source 1..372: mol_type = other DNA

SEQ ID NO: 1746 - protein, 124 aa, synthetic construct; identical to SEQ ID NO: 1618
  REGION 1..124: note = Description of Artificial Sequence: Synthetic polypeptide

SEQ ID NO: 1747 - DNA, 24 bp, synthetic construct
  misc_feature 1..24: note = Description of Artificial Sequence: Synthetic oligonucleotide
  source 1..24: mol_type = other DNA
ggtttcactttcgacgattatagc

SEQ ID NO: 1748 - protein, 8 aa, synthetic construct
  REGION 1..8: note = Description of Artificial Sequence: Synthetic peptide
GFTFDDYS

SEQ ID NO: 1749 - DNA, 24 bp, synthetic construct
  misc_feature 1..24: note = Description of Artificial Sequence: Synthetic oligonucleotide
  source 1..24: mol_type = other DNA
attagttggaactcaggaagtatt

SEQ ID NO: 1750 - protein, 8 aa, synthetic construct
  REGION 1..8: note = Description of Artificial Sequence: Synthetic peptide
ISWNSGSI

SEQ ID NO: 1751 - DNA, 51 bp, synthetic construct; identical to SEQ ID NO: 1623
  misc_feature 1..51: note = Description of Artificial Sequence: Synthetic oligonucleotide
  source 1..51: mol_type = other DNA

SEQ ID NO: 1752 - protein, 17 aa, synthetic construct
  REGION 1..17: note = Description of Artificial Sequence: Synthetic peptide
AKDGSGYGYFYYYGMDV

SEQ ID NO: 1753 - DNA, 372 bp, synthetic construct
  misc_feature 1..372: note = Description of Artificial Sequence: Synthetic polynucleotide
  source 1..372: mol_type = other DNA
gaagttcaacttgtggaaagtggcggaggattggttcaaccaggacgttcattgaggctttcatgcgcagcttccggatttacatttgacgattacgcaatgcactgggttagacaggcaccaggaaaaggactggagtgggtgagcgggatttcatggaacagcggcagtatcggttatgcagactcagttaaaggaagattcaccatcagtagagacaacgcaaaaaattccctttatctccaaatgaactctcttagggccgaagatacagcattgtactactgcgcaaaagacggatcaggttacggaaaattttactactatggtatggatgtatggggtcagggaaccacagtaactgtatcaagc

SEQ ID NO: 1754 - protein, 124 aa, synthetic construct
  REGION 1..124: note = Description of Artificial Sequence: Synthetic polypeptide
EVQLVESGGGLVQPGRSLRLSCAASGFTFDDYAMHWVRQAPGKGLEWVSGISWNSGSIGYADSVKGRFTISRDNAKNSLYLQMNSLRAEDTALYYCAKDGSGYGKFYYYGMDVWGQGTTVTVSS

SEQ ID NO: 1755 - DNA, 24 bp, synthetic construct
  misc_feature 1..24: note = Description of Artificial Sequence: Synthetic oligonucleotide
  source 1..24: mol_type = other DNA
ggatttacatttgacgattacgca

SEQ ID NO: 1756 - protein, 8 aa, synthetic construct
  REGION 1..8: note = Description of Artificial Sequence: Synthetic peptide
GFTFDDYA

SEQ ID NO: 1757 - DNA, 24 bp, synthetic construct
  misc_feature 1..24: note = Description of Artificial Sequence: Synthetic oligonucleotide
  source 1..24: mol_type = other DNA
atttcatggaacagcggcagtatc

SEQ ID NO: 1758 - protein, 8 aa, synthetic construct
  REGION 1..8: note = Description of Artificial Sequence: Synthetic peptide
ISWNSGSI

SEQ ID NO: 1759 - DNA, 51 bp, synthetic construct
  misc_feature 1..51: note = Description of Artificial Sequence: Synthetic oligonucleotide
  source 1..51: mol_type = other DNA
gcaaaagacggatcaggttacggaaaattttactactatggtatggatgta

SEQ ID NO: 1760 - protein, 17 aa, synthetic construct
  REGION 1..17: note = Description of Artificial Sequence: Synthetic peptide
AKDGSGYGKFYYYGMDV

SEQ ID NO: 1761 - DNA, 372 bp, synthetic construct; identical to SEQ ID NO: 1625
  misc_feature 1..372: note = Description of Artificial Sequence: Synthetic polynucleotide
  source 1..372: mol_type = other DNA

SEQ ID NO: 1762 - protein, 124 aa, synthetic construct; identical to SEQ ID NO: 1626
  REGION 1..124: note = Description of Artificial Sequence: Synthetic polypeptide

SEQ ID NO: 1763 - DNA, 24 bp, synthetic construct
  misc_feature 1..24: note = Description of Artificial Sequence: Synthetic oligonucleotide
  source 1..24: mol_type = other DNA
ggatttacatttgacgactattca

SEQ ID NO: 1764 - protein, 8 aa, synthetic construct
  REGION 1..8: note = Description of Artificial Sequence: Synthetic peptide
GFTFDDYS

SEQ ID NO: 1765 - DNA, 24 bp, synthetic construct
  misc_feature 1..24: note = Description of Artificial Sequence: Synthetic oligonucleotide
  source 1..24: mol_type = other DNA
atatcttggaactcaggcagtatt

SEQ ID NO: 1766 - protein, 8 aa, synthetic construct
  REGION 1..8: note = Description of Artificial Sequence: Synthetic peptide
ISWNSGSI

SEQ ID NO: 1767 - DNA, 51 bp, synthetic construct; identical to SEQ ID NO: 1631
  misc_feature 1..51: note = Description of Artificial Sequence: Synthetic oligonucleotide
  source 1..51: mol_type = other DNA

SEQ ID NO: 1768 - protein, 17 aa, synthetic construct
  REGION 1..17: note = Description of Artificial Sequence: Synthetic peptide
AKDGSGYGKFYYYGMDV

SEQ ID NO: 1769 - DNA, 372 bp, synthetic construct
  misc_feature 1..372: note = Description of Artificial Sequence: Synthetic polynucleotide
  source 1..372: mol_type = other DNA
gaagtacagcttgtagaatccggcggaggactggtacaacctggaagaagtcttagactgagttgcgcagctagtgggtttacattcgacgattacagcatgcattgggtgaggcaagctcctggtaaaggattggaatgggttagcgggatatcatggaactcaggaagcatcggatacgccgacagcgtgaaaggccgatttacaatatctagggacaacgcaaaaaactctctctaccttcaaatgaactctcttagggcagaagacacagcattgtattattgcgcaaaatacggcagtggttatggcaagttttatcattatggactggacgtgtggggacaagggacaacagtgacagtgagtagc

SEQ ID NO: 1770 - protein, 124 aa, synthetic construct
  REGION 1..124: note = Description of Artificial Sequence: Synthetic polypeptide
EVQLVESGGGLVQPGRSLRLSCAASGFTFDDYSMHWVRQAPGKGLEWVSGISWNSGSIGYADSVKGRFTISRDNAKNSLYLQMNSLRAEDTALYYCAKYGSGYGKFYHYGLDVWGQGTTVTVSS

SEQ ID NO: 1771 - DNA, 24 bp, synthetic construct
  misc_feature 1..24: note = Description of Artificial Sequence: Synthetic oligonucleotide
  source 1..24: mol_type = other DNA
gggtttacattcgacgattacagc

SEQ ID NO: 1772 - protein, 8 aa, synthetic construct
  REGION 1..8: note = Description of Artificial Sequence: Synthetic peptide
GFTFDDYS

SEQ ID NO: 1773 - DNA, 24 bp, synthetic construct
  misc_feature 1..24: note = Description of Artificial Sequence: Synthetic oligonucleotide
  source 1..24: mol_type = other DNA
atatcatggaactcaggaagcatc

SEQ ID NO: 1774 - protein, 8 aa, synthetic construct
  REGION 1..8: note = Description of Artificial Sequence: Synthetic peptide
ISWNSGSI

SEQ ID NO: 1775 - DNA, 51 bp, synthetic construct; identical to SEQ ID NO: 1615
  misc_feature 1..51: note = Description of Artificial Sequence: Synthetic oligonucleotide
  source 1..51: mol_type = other DNA

SEQ ID NO: 1776 - protein, 17 aa, synthetic construct
  REGION 1..17: note = Description of Artificial Sequence: Synthetic peptide
AKYGSGYGKFYHYGLDV

SEQ ID NO: 1777 - DNA, 372 bp, synthetic construct
  misc_feature 1..372: note = Description of Artificial Sequence: Synthetic polynucleotide
  source 1..372: mol_type = other DNA
gaagtacagcttgtagaatccggcggaggactggtacaacctggaagaagtcttagactgagttgcgcagctagtgggtttacattcgacgattacagcatgcattgggtgaggcaagctcctggtaaaggattggaatgggttagcgggatatcatggaactcaggaagcaagggatacgccgacagcgtgaaaggccgatttacaatatctagggacaacgcaaaaaactctctctaccttcaaatgaactctcttagggcagaagacacagcattgtattattgcgcaaaagacggcagtggttatggcaagttttatcattatggactggacgtgtggggacaagggacaacagtgacagtgagtagc

SEQ ID NO: 1778 - protein, 124 aa, synthetic construct
  REGION 1..124: note = Description of Artificial Sequence: Synthetic polypeptide
EVQLVESGGGLVQPGRSLRLSCAASGFTFDDYSMHWVRQAPGKGLEWVSGISWNSGSKGYADSVKGRFTISRDNAKNSLYLQMNSLRAEDTALYYCAKDGSGYGKFYHYGLDVWGQGTTVTVSS

SEQ ID NO: 1779 - DNA, 24 bp, synthetic construct
  misc_feature 1..24: note = Description of Artificial Sequence: Synthetic oligonucleotide
  source 1..24: mol_type = other DNA
gggtttacattcgacgattacagc

SEQ ID NO: 1780 - protein, 8 aa, synthetic construct
  REGION 1..8: note = Description of Artificial Sequence: Synthetic peptide
GFTFDDYS

SEQ ID NO: 1781 - DNA, 24 bp, synthetic construct
  misc_feature 1..24: note = Description of Artificial Sequence: Synthetic oligonucleotide
  source 1..24: mol_type = other DNA
atatcatggaactcaggaagcaag

SEQ ID NO: 1782 - protein, 8 aa, synthetic construct
  REGION 1..8: note = Description of Artificial Sequence: Synthetic peptide
ISWNSGSK

SEQ ID NO: 1783 - DNA, 51 bp, synthetic construct
  misc_feature 1..51: note = Description of Artificial Sequence: Synthetic oligonucleotide
  source 1..51: mol_type = other DNA
gcaaaagacggcagtggttatggcaagttttatcattatggactggacgtg

SEQ ID NO: 1784 - protein, 17 aa, synthetic construct
  REGION 1..17: note = Description of Artificial Sequence: Synthetic peptide
AKDGSGYGKFYHYGLDV

SEQ ID NO: 1785 - DNA, 372 bp, synthetic construct
  misc_feature 1..372: note = Description of Artificial Sequence: Synthetic polynucleotide
  source 1..372: mol_type = other DNA
gaagtacagcttgtagaatccggcggaggactggtacaacctggaagaagtcttagactgagttgcgcagctagtgggtttacattcgacgattacagcatgcattgggtgaggcaagctcctggtaaaggattggaatgggttagcgggatatcatggaactcaggaagcaagggatacgccgacagcgtgaaaggccgatttacaatatctagggacaacgcaaaaaactctctctaccttcaaatgaactctcttagggcagaagacacagcattgtattattgcgcaaaatacggcagtggttatggcaagttttattattatggactggacgtgtggggacaagggacaacagtgacagtgagtagc

SEQ ID NO: 1786 - protein, 124 aa, synthetic construct
  REGION 1..124: note = Description of Artificial Sequence: Synthetic polypeptide
EVQLVESGGGLVQPGRSLRLSCAASGFTFDDYSMHWVRQAPGKGLEWVSGISWNSGSKGYADSVKGRFTISRDNAKNSLYLQMNSLRAEDTALYYCAKYGSGYGKFYYYGLDVWGQGTTVTVSS

SEQ ID NO: 1787 - DNA, 24 bp, synthetic construct
  misc_feature 1..24: note = Description of Artificial Sequence: Synthetic oligonucleotide
  source 1..24: mol_type = other DNA
gggtttacattcgacgattacagc

SEQ ID NO: 1788 - protein, 8 aa, synthetic construct
  REGION 1..8: note = Description of Artificial Sequence: Synthetic peptide
GFTFDDYS

SEQ ID NO: 1789 - DNA, 24 bp, synthetic construct
  misc_feature 1..24: note = Description of Artificial Sequence: Synthetic oligonucleotide
  source 1..24: mol_type = other DNA
atatcatggaactcaggaagcaag

SEQ ID NO: 1790 - protein, 8 aa, synthetic construct
  REGION 1..8: note = Description of Artificial Sequence: Synthetic peptide
ISWNSGSK

SEQ ID NO: 1791 - DNA, 51 bp, synthetic construct
  misc_feature 1..51: note = Description of Artificial Sequence: Synthetic oligonucleotide
  source 1..51: mol_type = other DNA
gcaaaatacggcagtggttatggcaagttttattattatggactggacgtg

SEQ ID NO: 1792 - protein, 17 aa, synthetic construct
  REGION 1..17: note = Description of Artificial Sequence: Synthetic peptide
AKYGSGYGKFYYYGLDV

SEQ ID NO: 1793 - DNA, 372 bp, synthetic construct
  misc_feature 1..372: note = Description of Artificial Sequence: Synthetic polynucleotide
  source 1..372: mol_type = other DNA
gaagtacagcttgtagaatccggcggaggactggtacaacctggaagaagtcttagactgagttgcgcagctagtgggtttacattcgacgattacagcatgcattgggtgaggcaagctcctggtaaaggattggaatgggttagcgggatatcatggaactcaggaagcaagggatacgccgacagcgtgaaaggccgatttacaatatctagggacaacgcaaaaaactctctctaccttcaaatgaactctcttagggcagaagacacagcattgtattattgcgcaaaatacggcagtggttatggcaagttttatcattatggaatggacgtgtggggacaagggacaacagtgacagtgagtagc

SEQ ID NO: 1794 - protein, 124 aa, synthetic construct
  REGION 1..124: note = Description of Artificial Sequence: Synthetic polypeptide
EVQLVESGGGLVQPGRSLRLSCAASGFTFDDYSMHWVRQAPGKGLEWVSGISWNSGSKGYADSVKGRFTISRDNAKNSLYLQMNSLRAEDTALYYCAKYGSGYGKFYHYGMDVWGQGTTVTVSS

SEQ ID NO: 1795 - DNA, 24 bp, synthetic construct
  misc_feature 1..24: note = Description of Artificial Sequence: Synthetic oligonucleotide
  source 1..24: mol_type = other DNA
gggtttacattcgacgattacagc

SEQ ID NO: 1796 - protein, 8 aa, synthetic construct
  REGION 1..8: note = Description of Artificial Sequence: Synthetic peptide
GFTFDDYS

SEQ ID NO: 1797 - DNA, 24 bp, synthetic construct
  misc_feature 1..24: note = Description of Artificial Sequence: Synthetic oligonucleotide
  source 1..24: mol_type = other DNA
atatcatggaactcaggaagcaag

SEQ ID NO: 1798 - protein, 8 aa, synthetic construct
  REGION 1..8: note = Description of Artificial Sequence: Synthetic peptide
ISWNSGSK

SEQ ID NO: 1799 - DNA, 51 bp, synthetic construct
  misc_feature 1..51: note = Description of Artificial Sequence: Synthetic oligonucleotide
  source 1..51: mol_type = other DNA
gcaaaatacggcagtggttatggcaagttttatcattatggaatggacgtg

SEQ ID NO: 1800 - protein, 17 aa, synthetic construct
  REGION 1..17: note = Description of Artificial Sequence: Synthetic peptide
AKYGSGYGKFYHYGMDV

SEQ ID NO: 1801 - DNA, 372 bp, synthetic construct
  misc_feature 1..372: note = Description of Artificial Sequence: Synthetic polynucleotide
  source 1..372: mol_type = other DNA
gaagtacagcttgtagaatccggcggaggactggtacaacctggaagaagtcttagactgagttgcgcagctagtgggtttacattcgacgattacagcatgcattgggtgaggcaagctcctggtaaaggattggaatgggttagcgggatatcatggaactcaggaagcatcggatacgccgacagcgtgaaaggccgatttacaatatctagggacaacgcaaaaaactctctctaccttcaaatgaactctcttagggcagaagacacagcattgtattattgcgcaaaagacggcagtggttatggcaagttttatcattatggactggacgtgtggggacaagggacaacagtgacagtgagtagc

SEQ ID NO: 1802 - protein, 124 aa, synthetic construct
  REGION 1..124: note = Description of Artificial Sequence: Synthetic polypeptide
EVQLVESGGGLVQPGRSLRLSCAASGFTFDDYSMHWVRQAPGKGLEWVSGISWNSGSIGYADSVKGRFTISRDNAKNSLYLQMNSLRAEDTALYYCAKDGSGYGKFYHYGLDVWGQGTTVTVSS

SEQ ID NO: 1803 - DNA, 24 bp, synthetic construct
  misc_feature 1..24: note = Description of Artificial Sequence: Synthetic oligonucleotide
  source 1..24: mol_type = other DNA
gggtttacattcgacgattacagc

SEQ ID NO: 1804 - protein, 8 aa, synthetic construct
  REGION 1..8: note = Description of Artificial Sequence: Synthetic peptide
GFTFDDYS

SEQ ID NO: 1805 - DNA, 24 bp, synthetic construct
  misc_feature 1..24: note = Description of Artificial Sequence: Synthetic oligonucleotide
  source 1..24: mol_type = other DNA
atatcatggaactcaggaagcatc

SEQ ID NO: 1806 - protein, 8 aa, synthetic construct
  REGION 1..8: note = Description of Artificial Sequence: Synthetic peptide
ISWNSGSI

SEQ ID NO: 1807 - DNA, 51 bp, synthetic construct; identical to SEQ ID NO: 1783
  misc_feature 1..51: note = Description of Artificial Sequence: Synthetic oligonucleotide
  source 1..51: mol_type = other DNA

SEQ ID NO: 1808 - protein, 17 aa, synthetic construct
  REGION 1..17: note = Description of Artificial Sequence: Synthetic peptide
AKDGSGYGKFYHYGLDV

SEQ ID NO: 1809 - DNA, 372 bp, synthetic construct
  misc_feature 1..372: note = Description of Artificial Sequence: Synthetic polynucleotide
  source 1..372: mol_type = other DNA
gaagtacagcttgtagaatccggcggaggactggtacaacctggaagaagtcttagactgagttgcgcagctagtgggtttacattcgacgattacagcatgcattgggtgaggcaagctcctggtaaaggattggaatgggttagcgggatatcatggaactcaggaagcatcggatacgccgacagcgtgaaaggccgatttacaatatctagggacaacgcaaaaaactctctctaccttcaaatgaactctcttagggcagaagacacagcattgtattattgcgcaaaatacggcagtggttatggcaagttttattattatggactggacgtgtggggacaagggacaacagtgacagtgagtagc

SEQ ID NO: 1810 - protein, 124 aa, synthetic construct
  REGION 1..124: note = Description of Artificial Sequence: Synthetic polypeptide
EVQLVESGGGLVQPGRSLRLSCAASGFTFDDYSMHWVRQAPGKGLEWVSGISWNSGSIGYADSVKGRFTISRDNAKNSLYLQMNSLRAEDTALYYCAKYGSGYGKFYYYGLDVWGQGTTVTVSS

SEQ ID NO: 1811 - DNA, 24 bp, synthetic construct
  misc_feature 1..24: note = Description of Artificial Sequence: Synthetic oligonucleotide
  source 1..24: mol_type = other DNA
gggtttacattcgacgattacagc

SEQ ID NO: 1812 - protein, 8 aa, synthetic construct
  REGION 1..8: note = Description of Artificial Sequence: Synthetic peptide
GFTFDDYS

SEQ ID NO: 1813 - DNA, 24 bp, synthetic construct
  misc_feature 1..24: note = Description of Artificial Sequence: Synthetic oligonucleotide
  source 1..24: mol_type = other DNA
atatcatggaactcaggaagcatc

SEQ ID NO: 1814 - protein, 8 aa, synthetic construct
  REGION 1..8: note = Description of Artificial Sequence: Synthetic peptide
ISWNSGSI

SEQ ID NO: 1815 - DNA, 51 bp, synthetic construct; identical to SEQ ID NO: 1791
  misc_feature 1..51: note = Description of Artificial Sequence: Synthetic oligonucleotide
  source 1..51: mol_type = other DNA

SEQ ID NO: 1816 - protein, 17 aa, synthetic construct
  REGION 1..17: note = Description of Artificial Sequence: Synthetic peptide
AKYGSGYGKFYYYGLDV

SEQ ID NO: 1817 - DNA, 372 bp, synthetic construct
  misc_feature 1..372: note = Description of Artificial Sequence: Synthetic polynucleotide
  source 1..372: mol_type = other DNA
gaagtacagcttgtagaatccggcggaggactggtacaacctggaagaagtcttagactgagttgcgcagctagtgggtttacattcgacgattacagcatgcattgggtgaggcaagctcctggtaaaggattggaatgggttagcgggatatcatggaactcaggaagcatcggatacgccgacagcgtgaaaggccgatttacaatatctagggacaacgcaaaaaactctctctaccttcaaatgaactctcttagggcagaagacacagcattgtattattgcgcaaaatacggcagtggttatggcaagttttatcattatggaatggacgtgtggggacaagggacaacagtgacagtgagtagc

SEQ ID NO: 1818 - protein, 124 aa, synthetic construct
  REGION 1..124: note = Description of Artificial Sequence: Synthetic polypeptide
EVQLVESGGGLVQPGRSLRLSCAASGFTFDDYSMHWVRQAPGKGLEWVSGISWNSGSIGYADSVKGRFTISRDNAKNSLYLQMNSLRAEDTALYYCAKYGSGYGKFYHYGMDVWGQGTTVTVSS

SEQ ID NO: 1819 - DNA, 24 bp, synthetic construct
  misc_feature 1..24: note = Description of Artificial Sequence: Synthetic oligonucleotide
  source 1..24: mol_type = other DNA
gggtttacattcgacgattacagc

SEQ ID NO: 1820 - protein, 8 aa, synthetic construct
  REGION 1..8: note = Description of Artificial Sequence: Synthetic peptide
GFTFDDYS

SEQ ID NO: 1821 - DNA, 24 bp, synthetic construct
  misc_feature 1..24: note = Description of Artificial Sequence: Synthetic oligonucleotide
  source 1..24: mol_type = other DNA
atatcatggaactcaggaagcatc

SEQ ID NO: 1822 - protein, 8 aa, synthetic construct
  REGION 1..8: note = Description of Artificial Sequence: Synthetic peptide
ISWNSGSI

SEQ ID NO: 1823 - DNA, 51 bp, synthetic construct; identical to SEQ ID NO: 1799
  misc_feature 1..51: note = Description of Artificial Sequence: Synthetic oligonucleotide
  source 1..51: mol_type = other DNA

SEQ ID NO: 1824 - protein, 17 aa, synthetic construct
  REGION 1..17: note = Description of Artificial Sequence: Synthetic peptide
AKYGSGYGKFYHYGMDV

SEQ ID NO: 1825 - DNA, 372 bp, synthetic construct
  misc_feature 1..372: note = Description of Artificial Sequence: Synthetic polynucleotide
  source 1..372: mol_type = other DNA
gaagtacagcttgtagaatccggcggaggactggtacaacctggaagaagtcttagactgagttgcgcagctagtgggtttacattcgacgattacagcatgcattgggtgaggcaagctcctggtaaaggattggaatgggttagcgggatatcatggaactcaggaagcaagggatacgccgacagcgtgaaaggccgatttacaatatctagggacaacgcaaaaaactctctctaccttcaaatgaactctcttagggcagaagacacagcattgtattattgcgcaaaagacggcagtggttatggcaagttttattattatggactggacgtgtggggacaagggacaacagtgacagtgagtagc

SEQ ID NO: 1826 - protein, 124 aa, synthetic construct
  REGION 1..124: note = Description of Artificial Sequence: Synthetic polypeptide
EVQLVESGGGLVQPGRSLRLSCAASGFTFDDYSMHWVRQAPGKGLEWVSGISWNSGSKGYADSVKGRFTISRDNAKNSLYLQMNSLRAEDTALYYCAKDGSGYGKFYYYGLDVWGQGTTVTVSS

SEQ ID NO: 1827 - DNA, 24 bp, synthetic construct
  misc_feature 1..24: note = Description of Artificial Sequence: Synthetic oligonucleotide
  source 1..24: mol_type = other DNA
gggtttacattcgacgattacagc

SEQ ID NO: 1828 - protein, 8 aa, synthetic construct
  REGION 1..8: note = Description of Artificial Sequence: Synthetic peptide
GFTFDDYS

SEQ ID NO: 1829 - DNA, 24 bp, synthetic construct
  misc_feature 1..24: note = Description of Artificial Sequence: Synthetic oligonucleotide
  source 1..24: mol_type = other DNA
atatcatggaactcaggaagcaag

SEQ ID NO: 1830 - protein, 8 aa, synthetic construct
  REGION 1..8: note = Description of Artificial Sequence: Synthetic peptide
ISWNSGSK

SEQ ID NO: 1831 - DNA, 51 bp, synthetic construct
  misc_feature 1..51: note = Description of Artificial Sequence: Synthetic oligonucleotide
  source 1..51: mol_type = other DNA
gcaaaagacggcagtggttatggcaagttttattattatggactggacgtg

SEQ ID NO: 1832 - protein, 17 aa, synthetic construct
  REGION 1..17: note = Description of Artificial Sequence: Synthetic peptide
AKDGSGYGKFYYYGLDV

SEQ ID NO: 1833 - DNA, 372 bp, synthetic construct
  misc_feature 1..372: note = Description of Artificial Sequence: Synthetic polynucleotide
  source 1..372: mol_type = other DNA
gaagtacagcttgtagaatccggcggaggactggtacaacctggaagaagtcttagactgagttgcgcagctagtgggtttacattcgacgattacagcatgcattgggtgaggcaagctcctggtaaaggattggaatgggttagcgggatatcatggaactcaggaagcaagggatacgccgacagcgtgaaaggccgatttacaatatctagggacaacgcaaaaaactctctctaccttcaaatgaactctcttagggcagaagacacagcattgtattattgcgcaaaagacggcagtggttatggcaagttttatcattatggaatggacgtgtggggacaagggacaacagtgacagtgagtagc

SEQ ID NO: 1834 - protein, 124 aa, synthetic construct
  REGION 1..124: note = Description of Artificial Sequence: Synthetic polypeptide
EVQLVESGGGLVQPGRSLRLSCAASGFTFDDYSMHWVRQAPGKGLEWVSGISWNSGSKGYADSVKGRFTISRDNAKNSLYLQMNSLRAEDTALYYCAKDGSGYGKFYHYGMDVWGQGTTVTVSS

SEQ ID NO: 1835 - DNA, 24 bp, synthetic construct
  misc_feature 1..24: note = Description of Artificial Sequence: Synthetic oligonucleotide
  source 1..24: mol_type = other DNA
gggtttacattcgacgattacagc

SEQ ID NO: 1836 - protein, 8 aa, synthetic construct
  REGION 1..8: note = Description of Artificial Sequence: Synthetic peptide
GFTFDDYS

SEQ ID NO: 1837 - DNA, 24 bp, synthetic construct
  misc_feature 1..24: note = Description of Artificial Sequence: Synthetic oligonucleotide
  source 1..24: mol_type = other DNA
atatcatggaactcaggaagcaag

SEQ ID NO: 1838 - protein, 8 aa, synthetic construct
  REGION 1..8: note = Description of Artificial Sequence: Synthetic peptide
ISWNSGSK

SEQ ID NO: 1839 - DNA, 51 bp, synthetic construct
  misc_feature 1..51: note = Description of Artificial Sequence: Synthetic oligonucleotide
  source 1..51: mol_type = other DNA
gcaaaagacggcagtggttatggcaagttttatcattatggaatggacgtg

SEQ ID NO: 1840 - protein, 17 aa, synthetic construct
  REGION 1..17: note = Description of Artificial Sequence: Synthetic peptide
AKDGSGYGKFYHYGMDV

SEQ ID NO: 1841 - DNA, 372 bp, synthetic construct
  misc_feature 1..372: note = Description of Artificial Sequence: Synthetic polynucleotide
  source 1..372: mol_type = other DNA
gaagtacagcttgtagaatccggcggaggactggtacaacctggaagaagtcttagactgagttgcgcagctagtgggtttacattcgacgattacagcatgcattgggtgaggcaagctcctggtaaaggattggaatgggttagcgggatatcatggaactcaggaagcaagggatacgccgacagcgtgaaaggccgatttacaatatctagggacaacgcaaaaaactctctctaccttcaaatgaactctcttagggcagaagacacagcattgtattattgcgcaaaatacggcagtggttatggcaagttttattattatggaatggacgtgtggggacaagggacaacagtgacagtgagtagc

SEQ ID NO: 1842 - protein, 124 aa, synthetic construct
  REGION 1..124: note = Description of Artificial Sequence: Synthetic polypeptide
EVQLVESGGGLVQPGRSLRLSCAASGFTFDDYSMHWVRQAPGKGLEWVSGISWNSGSKGYADSVKGRFTISRDNAKNSLYLQMNSLRAEDTALYYCAKYGSGYGKFYYYGMDVWGQGTTVTVSS

SEQ ID NO: 1843 - DNA, 24 bp, synthetic construct
  misc_feature 1..24: note = Description of Artificial Sequence: Synthetic oligonucleotide
  source 1..24: mol_type = other DNA
gggtttacattcgacgattacagc

SEQ ID NO: 1844 - protein, 8 aa, synthetic construct
  REGION 1..8: note = Description of Artificial Sequence: Synthetic peptide
GFTFDDYS

SEQ ID NO: 1845 - DNA, 24 bp, synthetic construct
  misc_feature 1..24: note = Description of Artificial Sequence: Synthetic oligonucleotide
  source 1..24: mol_type = other DNA
atatcatggaactcaggaagcaag

SEQ ID NO: 1846 - protein, 8 aa, synthetic construct
  REGION 1..8: note = Description of Artificial Sequence: Synthetic peptide
ISWNSGSK

SEQ ID NO: 1847 - DNA, 51 bp, synthetic construct
  misc_feature 1..51: note = Description of Artificial Sequence: Synthetic oligonucleotide
  source 1..51: mol_type = other DNA
gcaaaatacggcagtggttatggcaagttttattattatggaatggacgtg

SEQ ID NO: 1848 - protein, 17 aa, synthetic construct
  REGION 1..17: note = Description of Artificial Sequence: Synthetic peptide
AKYGSGYGKFYYYGMDV

SEQ ID NO: 1849 - DNA, 372 bp, synthetic construct
  misc_feature 1..372: note = Description of Artificial Sequence: Synthetic polynucleotide
  source 1..372: mol_type = other DNA
gaagtacagcttgtagaatccggcggaggactggtacaacctggaagaagtcttagactgagttgcgcagctagtgggtttacattcgacgattacagcatgcattgggtgaggcaagctcctggtaaaggattggaatgggttagcgggatatcatggaactcaggaagcatcggatacgccgacagcgtgaaaggccgatttacaatatctagggacaacgcaaaaaactctctctaccttcaaatgaactctcttagggcagaagacacagcattgtattattgcgcaaaagacggcagtggttatggcaagttttattattatggactggacgtgtggggacaagggacaacagtgacagtgagtagc

SEQ ID NO: 1850 - protein, 124 aa, synthetic construct
  REGION 1..124: note = Description of Artificial Sequence: Synthetic polypeptide
EVQLVESGGGLVQPGRSLRLSCAASGFTFDDYSMHWVRQAPGKGLEWVSGISWNSGSIGYADSVKGRFTISRDNAKNSLYLQMNSLRAEDTALYYCAKDGSGYGKFYYYGLDVWGQGTTVTVSS

SEQ ID NO: 1851 - DNA, 24 bp, synthetic construct
  misc_feature 1..24: note = Description of Artificial Sequence: Synthetic oligonucleotide
  source 1..24: mol_type = other DNA
gggtttacattcgacgattacagc

SEQ ID NO: 1852 - protein, 8 aa, synthetic construct
  REGION 1..8: note = Description of Artificial Sequence: Synthetic peptide
GFTFDDYS

SEQ ID NO: 1853 - DNA, 24 bp, synthetic construct
  misc_feature 1..24: note = Description of Artificial Sequence: Synthetic oligonucleotide
  source 1..24: mol_type = other DNA
atatcatggaactcaggaagcatc

SEQ ID NO: 1854 - protein, 8 aa, synthetic construct
  REGION 1..8: note = Description of Artificial Sequence: Synthetic peptide
ISWNSGSI

SEQ ID NO: 1855 - DNA, 51 bp, synthetic construct; identical to SEQ ID NO: 1831
  misc_feature 1..51: note = Description of Artificial Sequence: Synthetic oligonucleotide
  source 1..51: mol_type = other DNA

SEQ ID NO: 1856 - protein, 17 aa, synthetic construct
  REGION 1..17: note = Description of Artificial Sequence: Synthetic peptide
AKDGSGYGKFYYYGLDV

SEQ ID NO: 1857 - DNA, 372 bp, synthetic construct
  misc_feature 1..372: note = Description of Artificial Sequence: Synthetic polynucleotide
  source 1..372: mol_type = other DNA
gaagtacagcttgtagaatccggcggaggactggtacaacctggaagaagtcttagactgagttgcgcagctagtgggtttacattcgacgattacagcatgcattgggtgaggcaagctcctggtaaaggattggaatgggttagcgggatatcatggaactcaggaagcatcggatacgccgacagcgtgaaaggccgatttacaatatctagggacaacgcaaaaaactctctctaccttcaaatgaactctcttagggcagaagacacagcattgtattattgcgcaaaagacggcagtggttatggcaagttttatcattatggaatggacgtgtggggacaagggacaacagtgacagtgagtagc

SEQ ID NO: 1858 - protein, 124 aa, synthetic construct
  REGION 1..124: note = Description of Artificial Sequence: Synthetic polypeptide
EVQLVESGGGLVQPGRSLRLSCAASGFTFDDYSMHWVRQAPGKGLEWVSGISWNSGSIGYADSVKGRFTISRDNAKNSLYLQMNSLRAEDTALYYCAKDGSGYGKFYHYGMDVWGQGTTVTVSS

SEQ ID NO: 1859 - DNA, 24 bp, synthetic construct
  misc_feature 1..24: note = Description of Artificial Sequence: Synthetic oligonucleotide
  source 1..24: mol_type = other DNA
gggtttacattcgacgattacagc

SEQ ID NO: 1860 - protein, 8 aa, synthetic construct
  REGION 1..8: note = Description of Artificial Sequence: Synthetic peptide
GFTFDDYS

SEQ ID NO: 1861 - DNA, 24 bp, synthetic construct
  misc_feature 1..24: note = Description of Artificial Sequence: Synthetic oligonucleotide
  source 1..24: mol_type = other DNA
atatcatggaactcaggaagcatc

SEQ ID NO: 1862 - protein, 8 aa, synthetic construct
  REGION 1..8: note = Description of Artificial Sequence: Synthetic peptide
ISWNSGSI

SEQ ID NO: 1863 - DNA, 51 bp, synthetic construct; identical to SEQ ID NO: 1839
  misc_feature 1..51: note = Description of Artificial Sequence: Synthetic oligonucleotide
  source 1..51: mol_type = other DNA

SEQ ID NO: 1864 - protein, 17 aa, synthetic construct
  REGION 1..17: note = Description of Artificial Sequence: Synthetic peptide
AKDGSGYGKFYHYGMDV

SEQ ID NO: 1865 - DNA, 372 bp, synthetic construct
  misc_feature 1..372: note = Description of Artificial Sequence: Synthetic polynucleotide
  source 1..372: mol_type = other DNA
gaagtacagcttgtagaatccggcggaggactggtacaacctggaagaagtcttagactgagttgcgcagctagtgggtttacattcgacgattacagcatgcattgggtgaggcaagctcctggtaaaggattggaatgggttagcgggatatcatggaactcaggaagcatcggatacgccgacagcgtgaaaggccgatttacaatatctagggacaacgcaaaaaactctctctaccttcaaatgaactctcttagggcagaagacacagcattgtattattgcgcaaaatacggcagtggttatggcaagttttattattatggaatggacgtgtggggacaagggacaacagtgacagtgagtagc

SEQ ID NO: 1866 - protein, 124 aa, synthetic construct
  REGION 1..124: note = Description of Artificial Sequence: Synthetic polypeptide
EVQLVESGGGLVQPGRSLRLSCAASGFTFDDYSMHWVRQAPGKGLEWVSGISWNSGSIGYADSVKGRFTISRDNAKNSLYLQMNSLRAEDTALYYCAKYGSGYGKFYYYGMDVWGQGTTVTVSS

SEQ ID NO: 1867 - DNA, 24 bp, synthetic construct
  misc_feature 1..24: note = Description of Artificial Sequence: Synthetic oligonucleotide
  source 1..24: mol_type = other DNA
gggtttacattcgacgattacagc

SEQ ID NO: 1868 - protein, 8 aa, synthetic construct
  REGION 1..8: note = Description of Artificial Sequence: Synthetic peptide
GFTFDDYS

SEQ ID NO: 1869 - DNA, 24 bp, synthetic construct
  misc_feature 1..24: note = Description of Artificial Sequence: Synthetic oligonucleotide
  source 1..24: mol_type = other DNA
atatcatggaactcaggaagcatc

SEQ ID NO: 1870 - protein, 8 aa, synthetic construct
  REGION 1..8: note = Description of Artificial Sequence: Synthetic peptide
ISWNSGSI

SEQ ID NO: 1871 - DNA, 51 bp, synthetic construct; identical to SEQ ID NO: 1847
  misc_feature 1..51: note = Description of Artificial Sequence: Synthetic oligonucleotide
  source 1..51: mol_type = other DNA

SEQ ID NO: 1872 - protein, 17 aa, synthetic construct
  REGION 1..17: note = Description of Artificial Sequence: Synthetic peptide
AKYGSGYGKFYYYGMDV

SEQ ID NO: 1873 - DNA, 372 bp, synthetic construct
  misc_feature 1..372: note = Description of Artificial Sequence: Synthetic polynucleotide
  source 1..372: mol_type = other DNA
gaagtacagcttgtagaatccggcggaggactggtacaacctggaagaagtcttagactgagttgcgcagctagtgggtttacattcgacgattacagcatgcattgggtgaggcaagctcctggtaaaggattggaatgggttagcgggatatcatggaactcaggaagcaagggatacgccgacagcgtgaaaggccgatttacaatatctagggacaacgcaaaaaactctctctaccttcaaatgaactctcttagggcagaagacacagcattgtattattgcgcaaaagacggcagtggttatggcaagttttattattatggaatggacgtgtggggacaagggacaacagtgacagtgagtagc

SEQ ID NO: 1874 - protein, 124 aa, synthetic construct
  REGION 1..124: note = Description of Artificial Sequence: Synthetic polypeptide
EVQLVESGGGLVQPGRSLRLSCAASGFTFDDYSMHWVRQAPGKGLEWVSGISWNSGSKGYADSVKGRFTISRDNAKNSLYLQMNSLRAEDTALYYCAKDGSGYGKFYYYGMDVWGQGTTVTVSS

SEQ ID NO: 1875 - DNA, 24 bp, synthetic construct
  misc_feature 1..24: note = Description of Artificial Sequence: Synthetic oligonucleotide
  source 1..24: mol_type = other DNA
gggtttacattcgacgattacagc

SEQ ID NO: 1876 - protein, 8 aa, synthetic construct
  REGION 1..8: note = Description of Artificial Sequence: Synthetic peptide
GFTFDDYS

SEQ ID NO: 1877 - DNA, 24 bp, synthetic construct
  misc_feature 1..24: note = Description of Artificial Sequence: Synthetic oligonucleotide
  source 1..24: mol_type = other DNA
atatcatggaactcaggaagcaag

SEQ ID NO: 1878 - protein, 8 aa, synthetic construct
  REGION 1..8: note = Description of Artificial Sequence: Synthetic peptide
ISWNSGSK

SEQ ID NO: 1879 - DNA, 51 bp, synthetic construct
  misc_feature 1..51: note = Description of Artificial Sequence: Synthetic oligonucleotide
  source 1..51: mol_type = other DNA
gcaaaagacggcagtggttatggcaagttttattattatggaatggacgtg

SEQ ID NO: 1880 - protein, 17 aa, synthetic construct
  REGION 1..17: note = Description of Artificial Sequence: Synthetic peptide
AKDGSGYGKFYYYGMDV

SEQ ID NO: 1881 - DNA, 372 bp, synthetic construct
  misc_feature 1..372: note = Description of Artificial Sequence: Synthetic polynucleotide
  source 1..372: mol_type = other DNA
gaagtgcagctggtggagtctgggggaggcttggtacagcctggcaggtccctgagactctcctgtgtagcctctggattcacctttgatgattattccatgcactgggtccggcaagctccagggaagggcctggagtgggtctcaggtattagttggaatagtggtagcaaagactatgcggactctgtgaagggccgattcaccatctccagagacaacgccaagaactccctgtatctgcaaatgaacagtctgagagctgaagacacggccttgtattactgtgcaaaatatggaagtggctacgggaagttctaccactacggtttggacgtctggggccaagggaccacggtcaccgtctcctca

SEQ ID NO: 1882 - protein, 124 aa, synthetic construct; identical to SEQ ID NO: 1506
  REGION 1..124: note = Description of Artificial Sequence: Synthetic polypeptide

SEQ ID NO: 1883 - DNA, 24 bp, synthetic construct
  misc_feature 1..24: note = Description of Artificial Sequence: Synthetic oligonucleotide
  source 1..24: mol_type = other DNA
ggattcacctttgatgattattcc

SEQ ID NO: 1884 - protein, 8 aa, synthetic construct
  REGION 1..8: note = Description of Artificial Sequence: Synthetic peptide
GFTFDDYS

SEQ ID NO: 1885 - DNA, 24 bp, synthetic construct
  misc_feature 1..24: note = Description of Artificial Sequence: Synthetic oligonucleotide
  source 1..24: mol_type = other DNA
attagttggaatagtggtagcaaa

SEQ ID NO: 1886 - protein, 8 aa, synthetic construct
  REGION 1..8: note = Description of Artificial Sequence: Synthetic peptide
ISWNSGSK

SEQ ID NO: 1887 - DNA, 51 bp, synthetic construct; identical to SEQ ID NO: 1511
  misc_feature 1..51: note = Description of Artificial Sequence: Synthetic oligonucleotide
  source 1..51: mol_type = other DNA

SEQ ID NO: 1888 - protein, 17 aa, synthetic construct
  REGION 1..17: note = Description of Artificial Sequence: Synthetic peptide
AKYGSGYGKFYHYGLDV

SEQ ID NO: 1889 - DNA, 324 bp, synthetic construct
  misc_feature 1..324: note = Description of Artificial Sequence: Synthetic polynucleotide
  source 1..324: mol_type = other DNA
gacatccagatgacccagtctccatcctccctgtctgcatctgttggagacagcgtcaccatcacttgccgggcaagtcagagcattaacaactatttaaattggtatcagcagaaaccagggaaagcccctaagctcctgatctatactgcatccagtttgctaagtggggtcccttcaaggttcagtggcagtggatctgggacagatttcactctcaccatcagcggtctgcaccctgaagattttgcaacttacttctgtcaacagagtttcagtacccctccgatcaccttcggccaagggacacgactggacattaaa

SEQ ID NO: 1890 - protein, 108 aa, synthetic construct
  REGION 1..108: note = Description of Artificial Sequence: Synthetic polypeptide
DIQMTQSPSSLSASVGDSVTITCRASQSINNYLNWYQQKPGKAPKLLIYTASSLLSGVPSRFSGSGSGTDFTLTISGLHPEDFATYFCQQSFSTPPITFGQGTRLDIK

SEQ ID NO: 1891 - DNA, 18 bp, synthetic construct
  misc_feature 1..18: note = Description of Artificial Sequence: Synthetic oligonucleotide
  source 1..18: mol_type = other DNA
cagagcattaacaactat

SEQ ID NO: 1892 - protein, 6 aa, synthetic construct
  REGION 1..6: note = Description of Artificial Sequence: Synthetic peptide
QSINNY

SEQ ID NO: 1893-1894 - skipped (2 entries)

SEQ ID NO: 1895 - DNA, 30 bp, synthetic construct
  misc_feature 1..30: note = Description of Artificial Sequence: Synthetic oligonucleotide
  source 1..30: mol_type = other DNA
caacagagtttcagtacccctccgatcacc

SEQ ID NO: 1896 - protein, 10 aa, synthetic construct
  REGION 1..10: note = Description of Artificial Sequence: Synthetic peptide
QQSFSTPPIT

SEQ ID NO: 1897 - protein, 207 aa, synthetic construct
  REGION 1..207: note = Description of Artificial Sequence: Synthetic polypeptide
MQSGTHWRVLGLCLLSVGVWGQDGNEEMGGITQTPYKVSISGTTVILTCPQYPGSEILWQHNDKNIGGDEDDKNIGSDEDHLSLKEFSELEQSGYYVCYPRGSKPEDANFYLYLRARVCENCMEMDVMSVATIVIVDICITGGLLLLVYYWSKNRKAKAKPVTRGAGAGGRQRGQNKERPPPVPNPDYEPIRKGQRDLYSGLNQRRI

SEQ ID NO: 1898 - protein, 171 aa, synthetic construct
  REGION 1..171: note = Description of Artificial Sequence: Synthetic polypeptide
MEHSTFLSGLVLATLLSQVSPFKIPIEELEDRVFVNCNTSITWVEGTVGTLLSDITRLDLGKRILDPRGIYRCNGTDIYKDKESTVQVHYRMCQSCVELDPATVAGIIVTDVIATLLLALGVFCFAGHETGRLSGAADTQALLRNDQVYQPLRDRDDAQYSHLGGNWARNK

SEQ ID NO: 1899 - protein, 490 aa, Homo sapiens
MESISMMGSPKSLSETFLPNGINGIKDARKVTVGVIGSGDFAKSLTIRLIRCGYHVVIGSRNPKFASEFFPHVVDVTHHEDALTKTNIIFVAIHREHYTSLWDLRHLLVGKILIDVSNNMRINQYPESNAEYLASLFPDSLIVKGFNVVSAWALQLGPKDASRQVYICSNNIQARQQVIELARQLNFIPIDLGSLSSAREIENLPLRLFTLWRGPVVVAISLATFFFLYSFVRDVIHPYARNQQSDFYKIPIEIVNKTLPIVAITLLSLVYLAGLLAAAYQLYYGTKYRRFPPWLETWLQCRKQLGLLSFFFAMVHVAYSLCLPMRRSERYLFLNMAYQQVHANIENSWNEEEVWRIEMYISFGIMSLGLLSLLAVTSIPSVSNALNWREFSFIQSTLGYVALLISTFHVLIYGWKRAFEEEYYRFYTPPNFVLALVLPSIVILGKIILFLPCISRKLKRIKKGWEKSQFLEEGMGGTIPHVSPERVTVM

SEQ ID NO: 1900 - protein, 207 aa, synthetic construct; identical to SEQ ID NO: 1897
  REGION 1..207: note = Description of Artificial Sequence: Synthetic polypeptide

SEQ ID NO: 1901 - protein, 171 aa, synthetic construct; identical to SEQ ID NO: 1898
  REGION 1..171: note = Description of Artificial Sequence: Synthetic polypeptide

SEQ ID NO: 1902 - skipped

SEQ ID NO: 1903 - protein, 25 aa, synthetic construct [sequence omitted]

SEQ ID NO: 1904 - protein, 17 aa, synthetic construct
  REGION 1..17: note = Description of Artificial Sequence: Synthetic peptide
MHWVRQAPGKGLEWVSG

SEQ ID NO: 1905 - protein, 38 aa, synthetic construct
  REGION 1..38: note = Description of Artificial Sequence: Synthetic polypeptide
GYADSVKGRFTISRDNAKNSLYLQMNSLRAEDTALYYC

SEQ ID NO: 1906 - protein, 11 aa, synthetic construct
  REGION 1..11: note = Description of Artificial Sequence: Synthetic peptide
WGQGTTVTVSS

SEQ ID NO: 1907 - protein, 8 aa, synthetic construct
  REGION 1..8: note = Description of Artificial Sequence: Synthetic peptide
  VARIANT 8: note = MOD_RES - Any amino acid
GFTFDDYX

SEQ ID NO: 1908 - protein, 8 aa, synthetic construct
  REGION 1..8: note = Description of Artificial Sequence: Synthetic peptide
  VARIANT 8: note = MOD_RES - Any amino acid
ISWNSGSX

SEQ ID NO: 1909 - protein, 17 aa, synthetic construct
  REGION 1..17: note = Description of Artificial Sequence: Synthetic peptide
  VARIANT 3: note = MOD_RES - Any amino acid
  VARIANT 12: note = MOD_RES - Any amino acid
  VARIANT 15: note = MOD_RES - Any amino acid
AKXGSGYGKFYXYGXDV

SEQ ID NO: 1910 - protein, 125 aa, synthetic construct
  REGION 1..125: note = Description of Artificial Sequence: Synthetic polypeptide
EVQLVESGGGLVQPGRSLRLSCAASGFTFDDYAMHWVRQAPGKGLEWVSGISWNSGSIGYADSVKGRFTISRDNAKNSLYLQMNSLRAEDTALYYCAKDGYSGYGYFYYYGMDVWGQGTTVTVSS

SEQ ID NO: 1911 - protein, 330 aa, synthetic construct [sequence omitted]

SEQ ID NO: 1912 - protein, 330 aa, synthetic construct
  REGION 1..330: note = Description of Artificial Sequence: Synthetic polypeptide
ASTKGPSVFPLAPSSKSTSGGTAALGCLVKDYFPEPVTVSWNSGALTSGVHTFPAVLQSSGLYSLSSVVTVPSSSLGTQTYICNVNHKPSNTKVDKKVEPKSCDKTHTCPPCPAPELLGGPSVFLFPPKPKDTLMISRTPEVTCVVVDVSHEDPEVKFNWYVDGVEVHNAKTKPREEQYNSTYRVVSVLTVLHQDWLNGKEYKCKVSNKALPAPIEKTISKAKGQPREPQVYTLPPSRDELTKNQVSLTCLVKGFYPSDIAVEWESNGQPENNYKTTPPVLDSDGSFFLYSKLTVDKSRWQQGNVFSCSVMHEALHNRFTQKSLSLSPGK

SEQ ID NO: 1913 - protein, 326 aa, synthetic construct
  REGION 1..326: note = Description of Artificial Sequence: Synthetic polypeptide
ASTKGPSVFPLAPCSRSTSESTAALGCLVKDYFPEPVTVSWNSGALTSGVHTFPAVLQSSGLYSLSSVVTVPSSNFGTQTYTCNVDHKPSNTKVDKTVERKCCVECPPCPAPPVAGPSVFLFPPKPKDTLMISRTPEVTCVVVDVSHEDPEVQFNWYVDGVEVHNAKTKPREEQFNSTFRVVSVLTVVHQDWLNGKEYKCKVSNKGLPAPIEKTISKTKGQPREPQVYTLPPSREEMTKNQVSLTCLVKGFYPSDISVEWESNGQPENNYKTTPPMLDSDGSFFLYSKLTVDKSRWQQGNVFSCSVMHEALHNHYTQKSLSLSPGK

SEQ ID NO: 1914 - protein, 326 aa, synthetic construct
  REGION 1..326: note = Description of Artificial Sequence: Synthetic polypeptide
ASTKGPSVFPLAPCSRSTSESTAALGCLVKDYFPEPVTVSWNSGALTSGVHTFPAVLQSSGLYSLSSVVTVPSSNFGTQTYTCNVDHKPSNTKVDKTVERKCCVECPPCPAPPVAGPSVFLFPPKPKDTLMISRTPEVTCVVVDVSHEDPEVQFNWYVDGVEVHNAKTKPREEQFNSTFRVVSVLTVVHQDWLNGKEYKCKVSNKGLPAPIEKTISKTKGQPREPQVYTLPPSREEMTKNQVSLTCLVKGFYPSDISVEWESNGQPENNYKTTPPMLDSDGSFFLYSKLTVDKSRWQQGNVFSCSVMHEALHNRFTQKSLSLSPGK

SEQ ID NO: 1915 - protein, 327 aa, synthetic construct
  REGION 1..327: note = Description of Artificial Sequence: Synthetic polypeptide
ASTKGPSVFPLAPCSRSTSESTAALGCLVKDYFPEPVTVSWNSGALTSGVHTFPAVLQSSGLYSLSSVVTVPSSSLGTKTYTCNVDHKPSNTKVDKRVESKYGPPCPSCPAPEFLGGPSVFLFPPKPKDTLMISRTPEVTCVVVDVSQEDPEVQFNWYVDGVEVHNAKTKPREEQFNSTYRVVSVLTVLHQDWLNGKEYKCKVSNKGLPSSIEKTISKAKGQPREPQVYTLPPSQEEMTKNQVSLTCLVKGFYPSDIAVEWESNGQPENNYKTTPPVLDSDGSFFLYSRLTVDKSRWQEGNVFSCSVMHEALHNHYTQKSLSLSLGK

SEQ ID NO: 1916 - protein, 327 aa, synthetic construct
  REGION 1..327: note = Description of Artificial Sequence: Synthetic polypeptide
ASTKGPSVFPLAPCSRSTSESTAALGCLVKDYFPEPVTVSWNSGALTSGVHTFPAVLQSSGLYSLSSVVTVPSSSLGTKTYTCNVDHKPSNTKVDKRVESKYGPPCPSCPAPEFLGGPSVFLFPPKPKDTLMISRTPEVTCVVVDVSQEDPEVQFNWYVDGVEVHNAKTKPREEQFNSTYRVVSVLTVLHQDWLNGKEYKCKVSNKGLPSSIEKTISKAKGQPREPQVYTLPPSQEEMTKNQVSLTCLVKGFYPSDIAVEWESNGQPENNYKTTPPVLDSDGSFFLYSRLTVDKSRWQEGNVFSCSVMHEALHNRFTQKSLSLSLGK

SEQ ID NO: 1917 - protein, 329 aa, synthetic construct
  REGION 1..329: note = Description of Artificial Sequence: Synthetic polypeptide
ASTKGPSVFPLAPSSKSTSGGTAALGCLVKDYFPEPVTVSWNSGALTSGVHTFPAVLQSSGLYSLSSVVTVPSSSLGTQTYICNVNHKPSNTKVDKKVEPKSCDKTHTCPPCPAPPVAGPSVFLFPPKPKDTLMISRTPEVTCVVVDVSQEDPEVQFNWYVDGVEVHNAKTKPREEQFNSTYRVVSVLTVLHQDWLNGKEYKCKVSNKGLPSSIEKTISKAKGQPREPQVYTLPPSRDELTKNQVSLTCLVKGFYPSDIAVEWESNGQPENNYKTTPPVLDSDGSFFLYSKLTVDKSRWQQGNVFSCSVMHEALHNHYTQKSLSLSPGK

SEQ ID NO: 1918 - protein, 329 aa, synthetic construct
  REGION 1..329: note = Description of Artificial Sequence: Synthetic polypeptide
ASTKGPSVFPLAPSSKSTSGGTAALGCLVKDYFPEPVTVSWNSGALTSGVHTFPAVLQSSGLYSLSSVVTVPSSSLGTQTYICNVNHKPSNTKVDKKVEPKSCDKTHTCPPCPAPPVAGPSVFLFPPKPKDTLMISRTPEVTCVVVDVSQEDPEVQFNWYVDGVEVHNAKTKPREEQFNSTYRVVSVLTVLHQDWLNGKEYKCKVSNKGLPSSIEKTISKAKGQPREPQVYTLPPSRDELTKNQVSLTCLVKGFYPSDIAVEWESNGQPENNYKTTPPVLDSDGSFFLYSKLTVDKSRWQQGNVFSCSVMHEALHNRFTQKSLSLSPGK

SEQ ID NO: 1919 - protein, 326 aa, synthetic construct
  REGION 1..326: note = Description of Artificial Sequence: Synthetic polypeptide
ASTKGPSVFPLAPCSRSTSESTAALGCLVKDYFPEPVTVSWNSGALTSGVHTFPAVLQSSGLYSLSSVVTVPSSSLGTKTYTCNVDHKPSNTKVDKRVESKYGPPCPPCPAPPVAGPSVFLFPPKPKDTLMISRTPEVTCVVVDVSQEDPEVQFNWYVDGVEVHNAKTKPREEQFNSTYRVVSVLTVLHQDWLNGKEYKCKVSNKGLPSSIEKTISKAKGQPREPQVYTLPPSQEEMTKNQVSLTCLVKGFYPSDIAVEWESNGQPENNYKTTPPVLDSDGSFFLYSRLTVDKSRWQEGNVFSCSVMHEALHNHYTQKSLSLSLGK

SEQ ID NO: 1920 - protein, 326 aa, synthetic construct
  REGION 1..326: note = Description of Artificial Sequence: Synthetic polypeptide
ASTKGPSVFPLAPCSRSTSESTAALGCLVKDYFPEPVTVSWNSGALTSGVHTFPAVLQSSGLYSLSSVVTVPSSSLGTKTYTCNVDHKPSNTKVDKRVESKYGPPCPPCPAPPVAGPSVFLFPPKPKDTLMISRTPEVTCVVVDVSQEDPEVQFNWYVDGVEVHNAKTKPREEQFNSTYRVVSVLTVLHQDWLNGKEYKCKVSNKGLPSSIEKTISKAKGQPREPQVYTLPPSQEEMTKNQVSLTCLVKGFYPSDIAVEWESNGQPENNYKTTPPVLDSDGSFFLYSRLTVDKSRWQEGNVFSCSVMHEALHNRFTQKSLSLSLGK

SEQ ID NO: 1921 - protein, 232 aa, synthetic construct
  REGION 1..232: note = Description of Artificial Sequence: Synthetic polypeptide
EPKSCDKTHTCPPCPAPELLGGPSVFLFPPKPKDTLMISRTPEVTCVVVDVSHEDPEVKFNWYVDGVEVHNAKTKPREEQYNSTYRVVSVLTVLHQDWLNGKEYKCKVSNKALPAPIEKTISKAKGQPREPQVYTLPPSRDELTKNQVSLTCLVKGFYPSDIAVEWESNGQPENNYKTTPPVLDSDGSFFLYSKLTVDKSRWQQGNVFSCSVMHEALHNHYTQKSLSLSPGK

SEQ ID NO: 1922 - protein, 232 aa, synthetic construct
  REGION 1..232: note = Description of Artificial Sequence: Synthetic polypeptide
EPKSCDKTHTCPPCPAPELLGGPSVFLFPPKPKDTLMISRTPEVTCVVVDVSHEDPEVKFNWYVDGVEVHNAKTKPREEQYNSTYRVVSVLTVLHQDWLNGKEYKCKVSNKALPAPIEKTISKAKGQPREPQVYTLPPSRDELTKNQVSLTCLVKGFYPSDIAVEWESNGQPENNYKTTPPVLDSDGSFFLYSKLTVDKSRWQQGNVFSCSVMHEALHNRFTQKSLSLSPGK

SEQ ID NO: 1923 - protein, 228 aa, synthetic construct
  REGION 1..228: note = Description of Artificial Sequence: Synthetic polypeptide
ERKCCVECPPCPAPPVAGPSVFLFPPKPKDTLMISRTPEVTCVVVDVSHEDPEVQFNWYVDGVEVHNAKTKPREEQFNSTFRVVSVLTVVHQDWLNGKEYKCKVSNKGLPAPIEKTISKTKGQPREPQVYTLPPSREEMTKNQVSLTCLVKGFYPSDISVEWESNGQPENNYKTTPPMLDSDGSFFLYSKLTVDKSRWQQGNVFSCSVMHEALHNHYTQKSLSLSPGK

SEQ ID NO: 1924 - protein, 228 aa, synthetic construct
  REGION 1..228: note = Description of Artificial Sequence: Synthetic polypeptide
ERKCCVECPPCPAPPVAGPSVFLFPPKPKDTLMISRTPEVTCVVVDVSHEDPEVQFNWYVDGVEVHNAKTKPREEQFNSTFRVVSVLTVVHQDWLNGKEYKCKVSNKGLPAPIEKTISKTKGQPREPQVYTLPPSREEMTKNQVSLTCLVKGFYPSDISVEWESNGQPENNYKTTPPMLDSDGSFFLYSKLTVDKSRWQQGNVFSCSVMHEALHNRFTQKSLSLSPGK

SEQ ID NO: 1925 - protein, 229 aa, synthetic construct
  REGION 1..229: note = Description of Artificial Sequence: Synthetic polypeptide
ESKYGPPCPSCPAPEFLGGPSVFLFPPKPKDTLMISRTPEVTCVVVDVSQEDPEVQFNWYVDGVEVHNAKTKPREEQFNSTYRVVSVLTVLHQDWLNGKEYKCKVSNKGLPSSIEKTISKAKGQPREPQVYTLPPSQEEMTKNQVSLTCLVKGFYPSDIAVEWESNGQPENNYKTTPPVLDSDGSFFLYSRLTVDKSRWQEGNVFSCSVMHEALHNRFTQKSLSLSLGK

SEQ ID NO: 1926 - protein, 229 aa, synthetic construct
  REGION 1..229: note = Description of Artificial Sequence: Synthetic polypeptide
ESKYGPPCPSCPAPEFLGGPSVFLFPPKPKDTLMISRTPEVTCVVVDVSQEDPEVQFNWYVDGVEVHNAKTKPREEQFNSTYRVVSVLTVLHQDWLNGKEYKCKVSNKGLPSSIEKTISKAKGQPREPQVYTLPPSQEEMTKNQVSLTCLVKGFYPSDIAVEWESNGQPENNYKTTPPVLDSDGSFFLYSRLTVDKSRWQEGNVFSCSVMHEALHNHYTQKSLSLSLGK

SEQ ID NO: 1927 - protein, 231 aa, synthetic construct
  REGION 1..231: note = Description of Artificial Sequence: Synthetic polypeptide
EPKSCDKTHTCPPCPAPPVAGPSVFLFPPKPKDTLMISRTPEVTCVVVDVSQEDPEVQFNWYVDGVEVHNAKTKPREEQFNSTYRVVSVLTVLHQDWLNGKEYKCKVSNKGLPSSIEKTISKAKGQPREPQVYTLPPSRDELTKNQVSLTCLVKGFYPSDIAVEWESNGQPENNYKTTPPVLDSDGSFFLYSKLTVDKSRWQQGNVFSCSVMHEALHNHYTQKSLSLSPGK

SEQ ID NO: 1928 - protein, 231 aa, synthetic construct
  REGION 1..231: note = Description of Artificial Sequence: Synthetic polypeptide
EPKSCDKTHTCPPCPAPPVAGPSVFLFPPKPKDTLMISRTPEVTCVVVDVSQEDPEVQFNWYVDGVEVHNAKTKPREEQFNSTYRVVSVLTVLHQDWLNGKEYKCKVSNKGLPSSIEKTISKAKGQPREPQVYTLPPSRDELTKNQVSLTCLVKGFYPSDIAVEWESNGQPENNYKTTPPVLDSDGSFFLYSKLTVDKSRWQQGNVFSCSVMHEALHNRFTQKSLSLSPGK

SEQ ID NO: 1929 - protein, 228 aa, synthetic construct
  REGION 1..228: note = Description of Artificial Sequence: Synthetic polypeptide
ESKYGPPCPPCPAPPVAGPSVFLFPPKPKDTLMISRTPEVTCVVVDVSQEDPEVQFNWYVDGVEVHNAKTKPREEQFNSTYRVVSVLTVLHQDWLNGKEYKCKVSNKGLPSSIEKTISKAKGQPREPQVYTLPPSQEEMTKNQVSLTCLVKGFYPSDIAVEWESNGQPENNYKTTPPVLDSDGSFFLYSRLTVDKSRWQEGNVFSCSVMHEALHNHYTQKSLSLSLGK

SEQ ID NO: 1930 - protein, 228 aa, synthetic construct
  REGION 1..228: note = Description of Artificial Sequence: Synthetic polypeptide
ESKYGPPCPPCPAPPVAGPSVFLFPPKPKDTLMISRTPEVTCVVVDVSQEDPEVQFNWYVDGVEVHNAKTKPREEQFNSTYRVVSVLTVLHQDWLNGKEYKCKVSNKGLPSSIEKTISKAKGQPREPQVYTLPPSQEEMTKNQVSLTCLVKGFYPSDIAVEWESNGQPENNYKTTPPVLDSDGSFFLYSRLTVDKSRWQEGNVFSCSVMHEALHNRFTQKSLSLSLGK

SEQ ID NO: 1931 - protein, 227 aa, synthetic construct
  REGION 1..227: note = Description of Artificial Sequence: Synthetic polypeptide
DKTHTCPPCPAPELLGGPSVFLFPPKPKDTLMISRTPEVTCVVVDVSHEDPEVKFNWYVDGVEVHNAKTKPREEQYNSTYRVVSVLTVLHQDWLNGKEYKCKVSNKALPAPIEKTISKAKGQPREPQVYTLPPSRDELTKNQVSLTCLVKGFYPSDIAVEWESNGQPENNYKTTPPVLDSDGSFFLYSKLTVDKSRWQQGNVFSCSVMHEALHNRFTQKSLSLSPGK

SEQ ID NO: 1932 - protein, 227 aa, synthetic construct
  REGION 1..227: note = Description of Artificial Sequence: Synthetic polypeptide
DKTHTCPPCPAPELLGGPSVFLFPPKPKDTLMISRTPEVTCVVVDVSHEDPEVKFNWYVDGVEVHNAKTKPREEQYNSTYRVVSVLTVLHQDWLNGKEYKCKVSNKALPAPIEKTISKAKGQPREPQVYTLPPSRDELTKNQVSLTCLVKGFYPSDIAVEWESNGQPENNYKTTPPVLDSDGSFFLYSKLTVDKSRWQQGNVFSCSVMHEALHNHYTQKSLSLSPGK

SEQ ID NO: 1933 - protein, 233 aa, synthetic construct
  REGION 1..233: note = Description of Artificial Sequence: Synthetic polypeptide
EPRGPTIKPCPPCKCPAPNLLGGPSVFIFPPKIKDVLMISLSPIVTCVVVDVSEDDPDVQISWFVNNVEVHTAQTQTHREDYNSTLRVVSALPIQHQDWMSGKEFKCKVNNKDLPAPIERTISKPKGSVRAPQVYVLPPPEEEMTKKQVTLTCMVTDFMPEDIYVEWTNNGKTELNYKNTEPVLDSDGSYFMYSKLRVEKKNWVERNSYSCSVVHEGLHNRFTTKSFSRTPGK

SEQ ID NO: 1934 - protein, 233 aa, synthetic construct
  REGION 1..233: note = Description of Artificial Sequence: Synthetic polypeptide
EPRGPTIKPCPPCKCPAPNLLGGPSVFIFPPKIKDVLMISLSPIVTCVVVDVSEDDPDVQISWFVNNVEVHTAQTQTHREDYNSTLRVVSALPIQHQDWMSGKEFKCKVNNKDLPAPIERTISKPKGSVRAPQVYVLPPPEEEMTKKQVTLTCMVTDFMPEDIYVEWTNNGKTELNYKNTEPVLDSDGSYFMYSKLRVEKKNWVERNSYSCSVVHEGLHNHHTTKSFSRTPGK

SEQ ID NO: 1935 - skipped

SEQ ID NO: 1936 - protein, 5 aa, synthetic construct
  REGION 1..5: note = Description of Artificial Sequence: Synthetic peptide
LLQGG

SEQ ID NO: 1937 - protein, 4 aa, synthetic construct
  REGION 1..4: note = Description of Artificial Sequence: Synthetic peptide
LLQG

SEQ ID NO: 1938 - protein, 6 aa, synthetic construct
  REGION 1..6: note = Description of Artificial Sequence: Synthetic peptide
LSLSQG

SEQ ID NO: 1939 - protein, 8 aa, synthetic construct
  REGION 1..8: note = Description of Artificial Sequence: Synthetic peptide
GGGLLQGG

SEQ ID NO: 1940 - protein, 5 aa, synthetic construct
  REGION 1..5: note = Description of Artificial Sequence: Synthetic peptide
GLLQG

SEQ ID NO: 1941 - protein, 10 aa, synthetic construct
  REGION 1..10: note = Description of Artificial Sequence: Synthetic peptide
GSPLAQSHGG

SEQ ID NO: 1942 - protein, 7 aa, synthetic construct
  REGION 1..7: note = Description of Artificial Sequence: Synthetic peptide
GLLQGGG

SEQ ID NO: 1943 - protein, 6 aa, synthetic construct
  REGION 1..6: note = Description of Artificial Sequence: Synthetic peptide
GLLQGG

SEQ ID NO: 1944 - protein, 4 aa, synthetic construct
  REGION 1..4: note = Description of Artificial Sequence: Synthetic peptide
GLLQ

SEQ ID NO: 1945 - protein, 8 aa, synthetic construct
  REGION 1..8: note = Description of Artificial Sequence: Synthetic peptide
LLQLLQGA

SEQ ID NO: 1946 - protein, 5 aa, synthetic construct
  REGION 1..5: note = Description of Artificial Sequence: Synthetic peptide
LLQGA

SEQ ID NO: 1947 - protein, 7 aa, synthetic construct
  REGION 1..7: note = Description of Artificial Sequence: Synthetic peptide
LLQYQGA

SEQ ID NO: 1948 - protein, 6 aa, synthetic construct
  REGION 1..6: note = Description of Artificial Sequence: Synthetic peptide
LLQGSG

SEQ ID NO: 1949 - protein, 6 aa, synthetic construct
  REGION 1..6: note = Description of Artificial Sequence: Synthetic peptide
LLQYQG

SEQ ID NO: 1950 - protein, 7 aa, synthetic construct
  REGION 1..7: note = Description of Artificial Sequence: Synthetic peptide
LLQLLQG

SEQ ID NO: 1951 - protein, 5 aa, synthetic construct
  REGION 1..5: note = Description of Artificial Sequence: Synthetic peptide
SLLQG

SEQ ID NO: 1952 - protein, 5 aa, synthetic construct
  REGION 1..5: note = Description of Artificial Sequence: Synthetic peptide
LLQLQ

SEQ ID NO: 1953 - protein, 6 aa, synthetic construct
  REGION 1..6: note = Description of Artificial Sequence: Synthetic peptide
LLQLLQ

SEQ ID NO: 1954 - protein, 5 aa, synthetic construct
  REGION 1..5: note = Description of Artificial Sequence: Synthetic peptide
LLQGR

SEQ ID NO: 1955 - DNA, 372 bp, Homo sapiens
  source 1..372: mol_type = unassigned DNA
caggtgcagctgcaggagtcgggcccaggactggtgaagccttcggagaccctgtccctcacctgcactgtctctggtgactccatcagtagttactattggacctggatccggcagcccccagggaagggactggagtggattgggtatatcttttacagggggggcaccacctacaacccctccctcaagagtcgagtcaccatatcagtagacacgtccaagaaccagttctccctgaagttgaggtctgtgaccgccgcagacacggccgtgtattactgtgcgaggggagacgatcttttagtggtgacaagtgtctactggtacatcgatctctggggccgtggcaccctggtcaccgtctcctca

SEQ ID NO: 1956 - protein, 124 aa, Homo sapiens
QVQLQESGPGLVKPSETLSLTCTVSGDSISSYYWTWIRQPPGKGLEWIGYIFYRGGTTYNPSLKSRVTISVDTSKNQFSLKLRSVTAADTAVYYCARGDDLLVVTSVYWYIDLWGRGTLVTVSS

SEQ ID NO: 1957 - DNA, 24 bp, Homo sapiens
  source 1..24: mol_type = unassigned DNA
ggtgactccatcagtagttactat

SEQ ID NO: 1958 - protein, 8 aa, Homo sapiens
GDSISSYY

SEQ ID NO: 1959 - DNA, 21 bp, Homo sapiens
  source 1..21: mol_type = unassigned DNA
atcttttacagggggggcacc

SEQ ID NO: 1960 - protein, 7 aa, Homo sapiens
IFYRGGT

SEQ ID NO: 1961 - DNA, 54 bp, Homo sapiens
  source 1..54: mol_type = unassigned DNA
gcgaggggagacgatcttttagtggtgacaagtgtctactggtacatcgatctc

SEQ ID NO: 1962 - protein, 18 aa, Homo sapiens
ARGDDLLVVTSVYWYIDL

SEQ ID NO: 1963 - DNA, 360 bp, Homo sapiens
  source 1..360: mol_type = unassigned DNA
caggtgcagctggtggagtctgggggaggcgtggtccagcctggggggtccctgagactctcctgtgcagcgtccggattcaccttcagtggctatggcatgcactgggtccgccaggctccaggcaaggggctggagtggatggcagttatatggtatgatggaagtaatgattactatccagactccgtgaagggccgattcaccatctccagagacaattccaagaacacgctgtatctgcaaatgaacagcctgagagtcgaggacacggctgtgtattactgtgcgcgagatgcgtgggacctactacgttcctttgactactggggccagggaaccctggtcaccgtctcctca

SEQ ID NO: 1964 - protein, 120 aa, Homo sapiens
QVQLVESGGGVVQPGGSLRLSCAASGFTFSGYGMHWVRQAPGKGLEWMAVIWYDGSNDYYPDSVKGRFTISRDNSKNTLYLQMNSLRVEDTAVYYCARDAWDLLRSFDYWGQGTLVTVSS

SEQ ID NO: 1965 - DNA, 24 bp, Homo sapiens
  source 1..24: mol_type = unassigned DNA
ggattcaccttcagtggctatggc

SEQ ID NO: 1966 - protein, 8 aa, Homo sapiens
GFTFSGYG

SEQ ID NO: 1967 - DNA, 24 bp, Homo sapiens
  source 1..24: mol_type = unassigned DNA
atatggtatgatggaagtaatgat

SEQ ID NO: 1968 - protein, 8 aa, Homo sapiens
IWYDGSND

SEQ ID NO: 1969 - DNA, 39 bp, Homo sapiens
  source 1..39: mol_type = unassigned DNA
gcgcgagatgcgtgggacctactacgttcctttgactac

SEQ ID NO: 1970 - protein, 13 aa, Homo sapiens
ARDAWDLLRSFDY

SEQ ID NO: 1971 - DNA, 363 bp, Homo sapiens
  source 1..363: mol_type = unassigned DNA
caggtgcagctggtggagtctgggggaggcgtggtccagcctgggaggtccctgagagtctcttgtgtagtgtctggattcaccttcagcagctttggcatgcattgggtccgccaggctccagacaaggggctggagtgggtggcagttatatggtatgatggaagtaatgattactattcagactccgtgaagggccgattcaccatctccagagacaattccaagaacacgctgtttctacaaatgaaccgcctgagagccgaagacacggctgtttattactgtgcgcgagctaataactggaaccgttttgatgcctttgatctctggggccaagggacaatggtcaccgtctcttca

SEQ ID NO: 1972 - protein, 121 aa, Homo sapiens
QVQLVESGGGVVQPGRSLRVSCVVSGFTFSSFGMHWVRQAPDKGLEWVAVIWYDGSNDYYSDSVKGRFTISRDNSKNTLFLQMNRLRAEDTAVYYCARANNWNRFDAFDLWGQGTMVTVSS

SEQ ID NO: 1973 - DNA, 24 bp, Homo sapiens
  source 1..24: mol_type = unassigned DNA
ggattcaccttcagcagctttggc

SEQ ID NO: 1974 - protein, 8 aa, Homo sapiens
GFTFSSFG

SEQ ID NO: 1975 - DNA, 24 bp, Homo sapiens
  source 1..24: mol_type = unassigned DNA
atatggtatgatggaagtaatgat

SEQ ID NO: 1976 - protein, 8 aa, Homo sapiens
IWYDGSND

SEQ ID NO: 1977 - DNA, 42 bp, Homo sapiens
  source 1..42: mol_type = unassigned DNA
gcgcgagctaataactggaaccgttttgatgcctttgatctc

SEQ ID NO: 1978 - protein, 14 aa, Homo sapiens
ARANNWNRFDAFDL

SEQ ID NO: 1979 - DNA, 372 bp, Homo sapiens
  source 1..372: mol_type = unassigned DNA
gaggtgcagctggtggagtctgggggaggcttggttcagcctggagggtccctgagactctcctgtgcagcctctggattcatcttcagtaattatgaaatgaactgggtccgccaggctccagggaagggactggaatggatttcatacattactagtagtggtaatatgaaatattacgcagactctgtgaagggccgattcaccatctccagagacaacgacaagaattcactgtatctgcaaatgagtagtctgagagtcgaggacacggctgtttattattgtgtgagaggagggcgatttttggagtggttgacctactacgttatggtcgtctggggccaagggaccacggtcaccgtctcctca

SEQ ID NO: 1980 - protein, 124 aa, Homo sapiens
EVQLVESGGGLVQPGGSLRLSCAASGFIFSNYEMNWVRQAPGKGLEWISYITSSGNMKYYADSVKGRFTISRDNDKNSLYLQMSSLRVEDTAVYYCVRGGRFLEWLTYYVMVVWGQGTTVTVSS

SEQ ID NO: 1981 - DNA, 24 bp, Homo sapiens
  source 1..24: mol_type = unassigned DNA
ggattcatcttcagtaattatgaa

SEQ ID NO: 1982 - protein, 8 aa, Homo sapiens
GFIFSNYE

SEQ ID NO: 1983 - DNA, 24 bp, Homo sapiens
  source 1..24: mol_type = unassigned DNA
attactagtagtggtaatatgaaa

SEQ ID NO: 1984 - protein, 8 aa, Homo sapiens
ITSSGNMK

SEQ ID NO: 1985 - DNA, 51 bp, Homo sapiens
  source 1..51: mol_type = unassigned DNA
gtgagaggagggcgatttttggagtggttgacctactacgttatggtcgtc

SEQ ID NO: 1986 - protein, 17 aa, Homo sapiens
VRGGRFLEWLTYYVMVV

SEQ ID NO: 1987 - DNA, 360 bp, Homo sapiens
  source 1..360: mol_type = unassigned DNA
caggtgcagctggtggagtctgggggaggcgtggtccagcctgggaggtccctgagactctcctgtgcagtgtctggattcaccttcagtagctatggcatgcactgggtccgccaggctccaggcaaggggctggagtgggtggcaaatatttggtatgatggaactaatgattactatccatactccgtgaagggccgattcaccatctccagagacaattcccagaacacactatatctgcaaatgaacagcctgagagccgaggacacggctgtatattactgtgcgagagaggacttcattaactaccggtcttttgactattggggccagggaaccctggtcaccgtctcctca

SEQ ID NO: 1988 - protein, 120 aa, Homo sapiens
QVQLVESGGGVVQPGRSLRLSCAVSGFTFSSYGMHWVRQAPGKGLEWVANIWYDGTNDYYPYSVKGRFTISRDNSQNTLYLQMNSLRAEDTAVYYCAREDFINYRSFDYWGQGTLVTVSS

SEQ ID NO: 1989 - DNA, 24 bp, Homo sapiens
  source 1..24: mol_type = unassigned DNA
ggattcaccttcagtagctatggc

SEQ ID NO: 1990 - protein, 8 aa, Homo sapiens
GFTFSSYG

SEQ ID NO: 1991 - DNA, 24 bp, Homo sapiens
  source 1..24: mol_type = unassigned DNA
atttggtatgatggaactaatgat

SEQ ID NO: 1992 - protein, 8 aa, Homo sapiens
IWYDGTND

SEQ ID NO: 1993 - DNA, 39 bp, Homo sapiens
  source 1..39: mol_type = unassigned DNA
gcgagagaggacttcattaactaccggtcttttgactat

SEQ ID NO: 1994 - protein, 13 aa, Homo sapiens
AREDFINYRSFDY

SEQ ID NO: 1995 - DNA, 372 bp, Homo sapiens
  source 1..372: mol_type = unassigned DNA
caggtgcagctggtggagtctgggggaggcgtggtccagccagggacgtccctgagactctcctgtgtcgcgtctggattcaccttcagaaattttggaatgcactgggtccgccaggctccaggcaaggggctggagtgggtggcaaatatatggtttgacggaagtaatgagaactatgtcgagtccattcagggccgattcaccatctccagagacaattccaagaacacactgaatctgcagatgaacagcctgagagccgaggactcggctgtctattactgtgtgagagagggaatcctaggaactactaatccttatgatgcttttgatgtctggggccaagggacaatggtcaccgtctcttca

SEQ ID NO: 1996 - protein, 124 aa, Homo sapiens
QVQLVESGGGVVQPGTSLRLSCVASGFTFRNFGMHWVRQAPGKGLEWVANIWFDGSNENYVESIQGRFTISRDNSKNTLNLQMNSLRAEDSAVYYCVREGILGTTNPYDAFDVWGQGTMVTVSS

SEQ ID NO: 1997 - DNA, 24 bp, Homo sapiens
  source 1..24: mol_type = unassigned DNA
ggattcaccttcagaaattttgga

SEQ ID NO: 1998 - protein, 8 aa, Homo sapiens
GFTFRNFG

SEQ ID NO: 1999 - DNA, 24 bp, Homo sapiens
  source 1..24: mol_type = unassigned DNA
atatggtttgacggaagtaatgag

SEQ ID NO: 2000 - protein, 8 aa, Homo sapiens
IWFDGSNE

SEQ ID NO: 2001 - DNA, 51 bp, Homo sapiens
  source 1..51: mol_type = unassigned DNA
gtgagagagggaatcctaggaactactaatccttatgatgcttttgatgtc

SEQ ID NO: 2002 - protein, 17 aa, Homo sapiens
VREGILGTTNPYDAFDV

SEQ ID NO: 2003 - DNA, 378 bp, Homo sapiens
  source 1..378: mol_type = unassigned DNA
caggtgcagctggtggagtctgggggaggcgtggtccagcctgggaggtccctgagactctcctgtgcagcgtctggattcacctttagtaactttggaatgcactgggtccgccaggcgccaggcaagggactggagtgggtggcaggtatatggtttgatggaagtaataaaaactatatagactccgtgaagggccgattcaccatctcaagagacaattccaagaacacgctgtatctgcaaatgaacagcctgagagccgaggacacggctgtgtattactgtgcgagagagggctatgattcggggactgattatatcccctatgatatttttgatatttggggccaagggacaatggtcaccgtctcttca

SEQ ID NO: 2004 - protein, 126 aa, Homo sapiens
QVQLVESGGGVVQPGRSLRLSCAASGFTFSNFGMHWVRQAPGKGLEWVAGIWFDGSNKNYIDSVKGRFTISRDNSKNTLYLQMNSLRAEDTAVYYCAREGYDSGTDYIPYDIFDIWGQGTMVTVSS

SEQ ID NO: 2005 - DNA, 24 bp, Homo sapiens
  source 1..24: mol_type = unassigned DNA
ggattcacctttagtaactttgga

SEQ ID NO: 2006 - protein, 8 aa, Homo sapiens
GFTFSNFG

SEQ ID NO: 2007 - DNA, 24 bp, Homo sapiens
  source 1..24: mol_type = unassigned DNA
atatggtttgatggaagtaataaa

SEQ ID NO: 2008 - protein, 8 aa, Homo sapiens
IWFDGSNK

SEQ ID NO: 2009 - DNA, 57 bp, Homo sapiens
  source 1..57: mol_type = unassigned DNA
gcgagagagggctatgattcggggactgattatatcccctatgatatttttgatatt

SEQ ID NO: 2010 - protein, 19 aa, Homo sapiens
AREGYDSGTDYIPYDIFDI

SEQ ID NO: 2011 - DNA, 363 bp, Homo sapiens
  source 1..363: mol_type = unassigned DNA
gaagtgcagctggtggagtctgggggaggcttggtacagcctggcacgtccctgagactctcctgtgcagcctctggattcacctttgatgattatgccatgcactgggtccggcaagctccagggaagggcctggagtgggtctcaggtattacttggaatagttataacatagactatgctgactctgtgaagggccgattcaccatctccagagacaacgccaagaactccctgtatctgcaaatgaacagtctgagagctgaggacacggccttgtattactgtgcaaaagatgatgactacagtaactacgtttactttgactactggggccagggaaccctggtcaccgtctcctca

SEQ ID NO: 2012 - protein, 121 aa, Homo sapiens
EVQLVESGGGLVQPGTSLRLSCAASGFTFDDYAMHWVRQAPGKGLEWVSGITWNSYNIDYADSVKGRFTISRDNAKNSLYLQMNSLRAEDTALYYCAKDDDYSNYVYFDYWGQGTLVTVSS

SEQ ID NO: 2013 - DNA, 24 bp, Homo sapiens
  source 1..24: mol_type = unassigned DNA
ggattcacctttgatgattatgcc

SEQ ID NO: 2014 - protein, 8 aa, Homo sapiens
GFTFDDYA

SEQ ID NO: 2015 - DNA, 24 bp, Homo sapiens
  source 1..24: mol_type = unassigned DNA
attacttggaatagttataacata

SEQ ID NO: 2016 - protein, 8 aa, Homo sapiens
ITWNSYNI

SEQ ID NO: 2017 - DNA, 42 bp, Homo sapiens
  source 1..42: mol_type = unassigned DNA
gcaaaagatgatgactacagtaactacgtttactttgactac

SEQ ID NO: 2018 - protein, 14 aa, Homo sapiens
AKDDDYSNYVYFDY

SEQ ID NO: 2019 - DNA, 360 bp, Homo sapiens
  source 1..360: mol_type = unassigned DNA
caggttcagctggtgcagtccggaactgaggtgaaggagcctggggcctcagtgaaggtctcctgtaaggcctctggttactcctttaccacctatggtatcagctggctgcgacaggcccctggacaaggacttgagtggatgggatggatcagcacttacaatggtgacacaatctctgcacagatgctccaggacagagtcaccctgaccgcagacacatccacgcgcacagcctacatggaactgagaagcctgagatctgacgacacggccgtgtattactgtgcgagaggtcatgagtatgatagtcttgtttattcttactggggccagggaaccctggtcaccgtctcctca

SEQ ID NO: 2020 - protein, 120 aa, Homo sapiens
QVQLVQSGTEVKEPGASVKVSCKASGYSFTTYGISWLRQAPGQGLEWMGWISTYNGDTISAQMLQDRVTLTADTSTRTAYMELRSLRSDDTAVYYCARGHEYDSLVYSYWGQGTLVTVSS

SEQ ID NO: 2021 - DNA, 24 bp, Homo sapiens
  source 1..24: mol_type = unassigned DNA
ggttactcctttaccacctatggt

SEQ ID NO: 2022 - protein, 8 aa, Homo sapiens
GYSFTTYG

SEQ ID NO: 2023 - DNA, 24 bp, Homo sapiens
  source 1..24: mol_type = unassigned DNA
atcagcacttacaatggtgacaca

SEQ ID NO: 2024 - protein, 8 aa, Homo sapiens
ISTYNGDT

SEQ ID NO: 2025 - DNA, 39 bp, Homo sapiens
  source 1..39: mol_type = unassigned DNA
gcgagaggtcatgagtatgatagtcttgtttattcttac

SEQ ID NO: 2026 - protein, 13 aa, Homo sapiens
ARGHEYDSLVYSY

SEQ ID NO: 2027 - DNA, 360 bp, Homo sapiens
  source 1..360: mol_type = unassigned DNA
caggtgcagctggtggagtctgggggaggcgtggtccagcctgggaggtccctgagactctcctgtgcagcgtctggattcaccttcagtagttatgccatgcactgggtccgccaggctccaggcagggggctggagtgggtggcggttatatggcatgatggagatgttgaatactatgtagactccgtgaaggaccgattcaccatctccagagacaattccaagagcacgctgtatctgcaaatgaacagcctgagagccgaagatacggctttatattattgtgcgagagaggcgtgggacctactacgtccctttgactattggggccagggaaccctggtcaccgtctcctca

SEQ ID NO: 2028 - protein, 120 aa, Homo sapiens
QVQLVESGGGVVQPGRSLRLSCAASGFTFSSYAMHWVRQAPGRGLEWVAVIWHDGDVEYYVDSVKDRFTISRDNSKSTLYLQMNSLRAEDTALYYCAREAWDLLRPFDYWGQGTLVTVSS

SEQ ID NO: 2029 - DNA, 24 bp, Homo sapiens
  source 1..24: mol_type = unassigned DNA
ggattcaccttcagtagttatgcc

SEQ ID NO: 2030 - protein, 8 aa, Homo sapiens
GFTFSSYA

SEQ ID NO: 2031 - DNA, 24 bp, Homo sapiens
  source 1..24: mol_type = unassigned DNA
atatggcatgatggagatgttgaa

SEQ ID NO: 2032 - protein, 8 aa, Homo sapiens
IWHDGDVE

SEQ ID NO: 2033 - DNA, 39 bp, Homo sapiens
  source 1..39: mol_type = unassigned DNA
gcgagagaggcgtgggacctactacgtccctttgactat

SEQ ID NO: 2034 - protein, 13 aa, Homo sapiens
AREAWDLLRPFDY

SEQ ID NO: 2035 - DNA, 351 bp, Homo sapiens
  source 1..351: mol_type = unassigned DNA
gaggtgcagctggtggagtctggaggaggcttggtccagcctggggggtccctgagactctcctgtgcagcctctgggttcatcgtcaccaccaactacatgacctggctccgccaggctccagggaaggggctggagtgggtctcacttatttatagcagtggtcacacatactacgcagactccgtgaagggccgattcaccatctccagacacaattccaagaacacactgtatctacaaatggacagcctgagagctgaggacacggccgtgtattactgtgcgagtgctttcgcagcggatgtttttgatatctggggccaagggacaatggtcaccgtctcttca

SEQ ID NO: 2036 - protein, 117 aa, Homo sapiens
EVQLVESGGGLVQPGGSLRLSCAASGFIVTTNYMTWLRQAPGKGLEWVSLIYSSGHTYYADSVKGRFTISRHNSKNTLYLQMDSLRAEDTAVYYCASAFAADVFDIWGQGTMVTVSS

SEQ ID NO: 2037 - DNA, 24 bp, Homo sapiens
  source 1..24: mol_type = unassigned DNA
gggttcatcgtcaccaccaactac

SEQ ID NO: 2038 - protein, 8 aa, Homo sapiens
GFIVTTNY

SEQ ID NO: 2039 - DNA, 21 bp, Homo sapiens
  source 1..21: mol_type = unassigned DNA
atttatagcagtggtcacaca

SEQ ID NO: 2040 - protein, 7 aa, Homo sapiens
IYSSGHT

SEQ ID NO: 2041 - DNA, 33 bp, Homo sapiens
  source 1..33: mol_type = unassigned DNA
gcgagtgctttcgcagcggatgtttttgatatc

SEQ ID NO: 2042 - protein, 11 aa, Homo sapiens
ASAFAADVFDI

SEQ ID NO: 2043 - DNA, 372 bp, Homo sapiens
  source 1..372: mol_type = unassigned DNA
caggtgcagctggtggagtctgggggaggcgtggtccagcctgggaggtccctgagactctcctgttcagcgtctggattctccttcagtcactttggcatgcactgggtccgccaggttccaggcgggggcctggagtgggtgacaagtatatggtttgatggaagtaatagatattatgcagactccttgaagggccgattcaccatctccagagacaattccaagaatactctgtatctggaaatgaacagcctgagagccgaggacacggctgtgtattactgtgtgagagaggggatactgggaactactaatccttatgatgtttttgatgtctggggtcaggggacaatggtcaccgtctcttca

SEQ ID NO: 2044 - protein, 124 aa, Homo sapiens
QVQLVESGGGVVQPGRSLRLSCSASGFSFSHFGMHWVRQVPGGGLEWVTSIWFDGSNRYYADSLKGRFTISRDNSKNTLYLEMNSLRAEDTAVYYCVREGILGTTNPYDVFDVWGQGTMVTVSS

SEQ ID NO: 2045 - DNA, 24 bp, Homo sapiens
  source 1..24: mol_type = unassigned DNA
ggattctccttcagtcactttggc

SEQ ID NO: 2046 - protein, 8 aa, Homo sapiens
GFSFSHFG

SEQ ID NO: 2047 - DNA, 24 bp, Homo sapiens
  source 1..24: mol_type = unassigned DNA
atatggtttgatggaagtaataga

SEQ ID NO: 2048 - protein, 8 aa, Homo sapiens
IWFDGSNR

SEQ ID NO: 2049 - DNA, 51 bp, Homo sapiens
  source 1..51: mol_type = unassigned DNA
gtgagagaggggatactgggaactactaatccttatgatgtttttgatgtc

SEQ ID NO: 2050 - protein, 17 aa, Homo sapiens
VREGILGTTNPYDVFDV

SEQ ID NO: 2051 - DNA, 372 bp, Homo sapiens
  source 1..372: mol_type = unassigned DNA
gaggtgcagctggtggagtctgggggaggcttggtacagccgggggggtccctgagactctcctgtgcagcctctggattcacctttagaagctatgtcatgagctggttccgccaggctccagggaaggggctggagtgggtctcaggaatgagtgggagtggtggaagcacatcctacgcagactccgtgaagggccggttcaccatctccagagacaattcaaagaatacgctgtatctgctaatgaacagcctgagaaccgaggacacggccgtatattattgtgcgaaagaaaacggggctaactggaactacggctactacggtatggacgtctggggccaagggaccacggtcaccgtctcctca

SEQ ID NO: 2052 - protein, 124 aa, Homo sapiens
EVQLVESGGGLVQPGGSLRLSCAASGFTFRSYVMSWFRQAPGKGLEWVSGMSGSGGSTSYADSVKGRFTISRDNSKNTLYLLMNSLRTEDTAVYYCAKENGANWNYGYYGMDVWGQGTTVTVSS

SEQ ID NO: 2053 - DNA, 24 bp, Homo sapiens
  source 1..24: mol_type = unassigned DNA
ggattcacctttagaagctatgtc

SEQ ID NO: 2054 - protein, 8 aa, Homo sapiens
GFTFRSYV

SEQ ID NO: 2055 - DNA, 24 bp, Homo sapiens
  source 1..24: mol_type = unassigned DNA
atgagtgggagtggtggaagcaca

SEQ ID NO: 2056 - protein, 8 aa, Homo sapiens
MSGSGGST

SEQ ID NO: 2057 - DNA, 51 bp, Homo sapiens
  source 1..51: mol_type = unassigned DNA
gcgaaagaaaacggggctaactggaactacggctactacggtatggacgtc

SEQ ID NO: 2058 - protein, 17 aa, Homo sapiens
AKENGANWNYGYYGMDV

SEQ ID NO: 2059 - DNA, 360 bp, Homo sapiens
  source 1..360: mol_type = unassigned DNA
caggtgcagctggtggagtctgggggaggcgtggtccagcctgggaggtccctgagactctcctgtgtagcgtctggattctccttcagtaactttggcatgcactgggtccgccaggctccaggcaaggggctggagtgggtggcaattatatggtatgatggaagtaataaatactattcagactccgtgaagggccgcttcaccatctccagagacaattccaagaacacgctgtatctgcaaatgaacagcctgagagtcgacgacacggctgtgtattactgtgcgagattcgatcgctggaaatttgacgcttttgatatctggggccaagggacaatggtcaccgtctcttca

SEQ ID NO: 2060 - protein, 120 aa, Homo sapiens
QVQLVESGGGVVQPGRSLRLSCVASGFSFSNFGMHWVRQAPGKGLEWVAIIWYDGSNKYYSDSVKGRFTISRDNSKNTLYLQMNSLRVDDTAVYYCARFDRWKFDAFDIWGQGTMVTVSS

SEQ ID NO: 2061 - DNA, 24 bp, Homo sapiens
  source 1..24: mol_type = unassigned DNA
ggattctccttcagtaactttggc

SEQ ID NO: 2062 - protein, 8 aa, Homo sapiens
GFSFSNFG

SEQ ID NO: 2063 - DNA, 24 bp, Homo sapiens
  source 1..24: mol_type = unassigned DNA
atatggtatgatggaagtaataaa

SEQ ID NO: 2064 - protein, 8 aa, Homo sapiens
IWYDGSNK

SEQ ID NO: 2065 - DNA, 39 bp, Homo sapiens
  source 1..39: mol_type = unassigned DNA
gcgagattcgatcgctggaaatttgacgcttttgatatc

SEQ ID NO: 2066 - protein, 13 aa, Homo sapiens
ARFDRWKFDAFDI

SEQ ID NO: 2067 - DNA, 360 bp, Homo sapiens
  source 1..360: mol_type = unassigned DNA
caggtgcagctggtggagtctgggggaggcgtggtccagcctgggaggtccctgagactctcctgtgcagcgtctggattcaccttcagtagctttgccatgcactgggtccgccaggctccaggcaaggggctggagtgggtggcagttatatggtatgatggaagtaatgattactatgcagcctccgtgaagggccgtttcaccatctccagagacaattccaagaacacgctgtatctggaaatgaacagactgagagccgaggacacggctgtgtatcactgtgcgagagataactggaattactgggggggtatggacgtctggggccaagggaccacggtcaccgtctcctca

SEQ ID NO: 2068 - protein, 120 aa, Homo sapiens
QVQLVESGGGVVQPGRSLRLSCAASGFTFSSFAMHWVRQAPGKGLEWVAVIWYDGSNDYYAASVKGRFTISRDNSKNTLYLEMNRLRAEDTAVYHCARDNWNYWGGMDVWGQGTTVTVSS

SEQ ID NO: 2069 - DNA, 24 bp, Homo sapiens
  source 1..24: mol_type = unassigned DNA
ggattcaccttcagtagctttgcc

SEQ ID NO: 2070 - protein, 8 aa, Homo sapiens
GFTFSSFA

SEQ ID NO: 2071 - DNA, 24 bp, Homo sapiens
  source 1..24: mol_type = unassigned DNA
atatggtatgatggaagtaatgat

SEQ ID NO: 2072 - protein, 8 aa, Homo sapiens
IWYDGSND

SEQ ID NO: 2073 - DNA, 39 bp, Homo sapiens
  source 1..39: mol_type = unassigned DNA
gcgagagataactggaattactgggggggtatggacgtc

SEQ ID NO: 2074 - protein, 13 aa, Homo sapiens
ARDNWNYWGGMDV

SEQ ID NO: 2075 - DNA, 375 bp, Homo sapiens
  source 1..375: mol_type = unassigned DNA
gaggtgcagctgttggagtctgggggaggctgggtgcagccgggggggtccctgagactctcctgtgcagcctctggattcgcctttagtaattatgccatgaactgggtccgccagactccagggaaggggctggagtgggtctcagttattagtagtagtggtggaaacacatactacgcagactccgtgaagggccggttcgccatctccagagacaattccagggatacgctgcatctgcaaatgaacagactgagagtcgaggacacggccgtctattactgtgcgaaagaaatacgtccgtattacgatctttcctactattacggtatggacgtctggggccaagggaccacggtcaccgtctcctca

SEQ ID NO: 2076 - protein, 125 aa, Homo sapiens
EVQLLESGGGWVQPGGSLRLSCAASGFAFSNYAMNWVRQTPGKGLEWVSVISSSGGNTYYADSVKGRFAISRDNSRDTLHLQMNRLRVEDTAVYYCAKEIRPYYDLSYYYGMDVWGQGTTVTVSS

SEQ ID NO: 2077 - DNA, 24 bp, Homo sapiens
  source 1..24: mol_type = unassigned DNA
ggattcgcctttagtaattatgcc

SEQ ID NO: 2078 - protein, 8 aa, Homo sapiens
GFAFSNYA

SEQ ID NO: 2079 - DNA, 24 bp, Homo sapiens
  source 1..24: mol_type = unassigned DNA
attagtagtagtggtggaaacaca

SEQ ID NO: 2080 - protein, 8 aa, Homo sapiens
ISSSGGNT

SEQ ID NO: 2081 - DNA, 54 bp, Homo sapiens
  source 1..54: mol_type = unassigned DNA
gcgaaagaaatacgtccgtattacgatctttcctactattacggtatggacgtc

SEQ ID NO: 2082 - protein, 18 aa, Homo sapiens
AKEIRPYYDLSYYYGMDV

SEQ ID NO: 2083 - DNA, 348 bp, Homo sapiens
  source 1..348: mol_type = unassigned DNA
caggtgcagctgcaggagtcgggcccaggactggtgaagtcttcggagaccctgtccctcacctgcactgtctctggtggctccatcagaaatttctactggagctggctccggcagcccccagggaagggactagagtggattgggcacatcaattacaatgggggcaccgactacaacccctccctcaagagtcgagtcaccatatcagtagacacgtccaagaatcagttctccctgaatttgaactctgtgaccgccgcagacacggccgtgtattactgtgcgagacagagattctacggtatggacgtctggggtccagggaccacggtcaccgtctcctca

SEQ ID NO: 2084 - protein, 116 aa, Homo sapiens
QVQLQESGPGLVKSSETLSLTCTVSGGSIRNFYWSWLRQPPGKGLEWIGHINYNGGTDYNPSLKSRVTISVDTSKNQFSLNLNSVTAADTAVYYCARQRFYGMDVWGPGTTVTVSS

SEQ ID NO: 2085 - DNA, 24 bp, Homo sapiens
  source 1..24: mol_type = unassigned DNA
ggtggctccatcagaaatttctac

SEQ ID NO: 2086 - protein, 8 aa, Homo sapiens
GGSIRNFY

SEQ ID NO: 2087 - DNA, 21 bp, Homo sapiens
  source 1..21: mol_type = unassigned DNA
atcaattacaatgggggcacc

SEQ ID NO: 2088 - protein, 7 aa, Homo sapiens
INYNGGT

SEQ ID NO: 2089 - DNA, 30 bp, Homo sapiens
  source 1..30: mol_type = unassigned DNA
gcgagacagagattctacggtatggacgtc

SEQ ID NO: 2090 - protein, 10 aa, Homo sapiens
ARQRFYGMDV

SEQ ID NO: 2091 - DNA, 324 bp, Homo sapiens; identical to SEQ ID NO: 57
  source 1..324: mol_type = unassigned DNA

SEQ ID NO: 2092 - protein, 108 aa, Homo sapiens; identical to SEQ ID NO: 58

SEQ ID NO: 2093 - DNA, 18 bp, Homo sapiens
  source 1..18: mol_type = unassigned DNA
cagagcattagcagctat

SEQ ID NO: 2094 - protein, 6 aa, Homo sapiens
QSISSY

SEQ ID NO: 2095-2096 - skipped (2 entries)

SEQ ID NO: 2097 - DNA, 30 bp, Homo sapiens; identical to SEQ ID NO: 15
  source 1..30: mol_type = unassigned DNA

SEQ ID NO: 2098 - protein, 10 aa, Homo sapiens
QQSYSTPPIT

SEQ ID NO: 2099 - protein, 1408 aa, Homo sapiens
MKAPAVLAPGILVLLFTLVQRSNGECKEALAKSEMNVNMKYQLPNFTAETPIQNVILHEHHIFLGATNYIYVLNEEDLQKVAEYKTGPVLEHPDCFPCQDCSSKANLSGGVWKDNINMALVVDTYYDDQLISCGSVNRGTCQRHVFPHNHTADIQSEVHCIFSPQIEEPSQCPDCVVSALGAKVLSSVKDRFINFFVGNTINSSYFPDHPLHSISVRRLKETKDGFMFLTDQSYIDVLPEFRDSYPIKYVHAFESNNFIYFLTVQRETLDAQTFHTRIIRFCSINSGLHSYMEMPLECILTEKRKKRSTKKEVFNILQAAYVSKPGAQLARQIGASLNDDILFGVFAQSKPDSAEPMDRSAMCAFPIKYVNDFFNKIVNKNNVRCLQHFYGPNHEHCFNRTLLRNSSGCEARRDEYRTEFTTALQRVDLFMGQFSEVLLTSISTFIKGDLTIANLGTSEGRFMQVVVSRSGPSTPHVNFLLDSHPVSPEVIVEHTLNQNGYTLVITGKKITKIPLNGLGCRHFQSCSQCLSAPPFVQCGWCHDKCVRSEECLSGTWTQQICLPAIYKVFPNSAPLEGGTRLTICGWDFGFRRNNKFDLKKTRVLLGNESCTLTLSESTMNTLKCTVGPAMNKHFNMSIIISNGHGTTQYSTFSYVDPVITSISPKYGPMAGGTLLTLTGNYLNSGNSRHISIGGKTCTLKSVSNSILECYTPAQTISTEFAVKLKIDLANRETSIFSYREDPIVYEIHPTKSFISTWWKEPLNIVSFLFCFASGGSTITGVGKNLNSVSVPRMVINVHEAGRNFTVACQHRSNSEIICCTTPSLQQLNLQLPLKTKAFFMLDGILSKYFDLIYVHNPVFKPFEKPVMISMGNENVLEIKGNDIDPEAVKGEVLKVGNKSCENIHLHSEAVLCTVPNDLLKLNSELNIEWKQAISSTVLGKVIVQPDQNFTGLIAGVVSISTALLLLLGFFLWLKKRKQIKDLGSELVRYDARVHTPHLDRLVSARSVSPTTEMVSNESVDYRATFPEDQFPNSSQNGSCRQVQYPLTDMSPILTSGDSDISSPLLQNTVHIDLSALNPELVQAVQHVVIGPSSLIVHFNEVIGRGHFGCVYHGTLLDNDGKKIHCAVKSLNRITDIGEVSQFLTEGIIMKDFSHPNVLSLLGICLRSEGSPLVVLPYMKHGDLRNFIRNETHNPTVKDLIGFGLQVAKGMKYLASKKFVHRDLAARNCMLDEKFTVKVADFGLARDMYDKEYYSVHNKTGAKLPVKWMALESLQTQKFTTKSDVWSFGVLLWELMTRGAPPYPDVNTFDITVYLLQGRRLLQPEYCPDPLYEVMLKCWHPKAEMRPSFSELVSRISAIFSTFIGEHYVHVNATYVNVKCVAPYPSLLSSEDNADDEVDTRPASFWETS

SEQ ID NO: 2100 - protein, 1390 aa, Homo sapiens
MKAPAVLAPGILVLLFTLVQRSNGECKEALAKSEMNVNMKYQLPNFTAETPIQNVILHEHHIFLGATNYIYVLNEEDLQKVAEYKTGPVLEHPDCFPCQDCSSKANLSGGVWKDNINMALVVDTYYDDQLISCGSVNRGTCQRHVFPHNHTADIQSEVHCIFSPQIEEPSQCPDCVVSALGAKVLSSVKDRFINFFVGNTINSSYFPDHPLHSISVRRLKETKDGFMFLTDQSYIDVLPEFRDSYPIKYVHAFESNNFIYFLTVQRETLDAQTFHTRIIRFCSINSGLHSYMEMPLECILTEKRKKRSTKKEVFNILQAAYVSKPGAQLARQIGASLNDDILFGVFAQSKPDSAEPMDRSAMCAFPIKYVNDFFNKIVNKNNVRCLQHFYGPNHEHCFNRTLLRNSSGCEARRDEYRTEFTTALQRVDLFMGQFSEVLLTSISTFIKGDLTIANLGTSEGRFMQVVVSRSGPSTPHVNFLLDSHPVSPEVIVEHTLNQNGYTLVITGKKITKIPLNGLGCRHFQSCSQCLSAPPFVQCGWCHDKCVRSEECLSGTWTQQICLPAIYKVFPNSAPLEGGTRLTICGWDFGFRRNNKFDLKKTRVLLGNESCTLTLSESTMNTLKCTVGPAMNKHFNMSIIISNGHGTTQYSTFSYVDPVITSISPKYGPMAGGTLLTLTGNYLNSGNSRHISIGGKTCTLKSVSNSILECYTPAQTISTEFAVKLKIDLANRETSIFSYREDPIVYEIHPTKSFISGGSTITGVGKNLNSVSVPRMVINVHEAGRNFTVACQHRSNSEIICCTTPSLQQLNLQLPLKTKAFFMLDGILSKYFDLIYVHNPVFKPFEKPVMISMGNENVLEIKGNDIDPEAVKGEVLKVGNKSCENIHLHSEAVLCTVPNDLLKLNSELNIEWKQAISSTVLGKVIVQPDQNFTGLIAGVVSISTALLLLLGFFLWLKKRKQIKDLGSELVRYDARVHTPHLDRLVSARSVSPTTEMVSNESVDYRATFPEDQFPNSSQNGSCRQVQYPLTDMSPILTSGDSDISSPLLQNTVHIDLSALNPELVQAVQHVVIGPSSLIVHFNEVIGRGHFGCVYHGTLLDNDGKKIHCAVKSLNRITDIGEVSQFLTEGIIMKDFSHPNVLSLLGICLRSEGSPLVVLPYMKHGDLRNFIRNETHNPTVKDLIGFGLQVAKGMKYLASKKFVHRDLAARNCMLDEKFTVKVADFGLARDMYDKEYYSVHNKTGAKLPVKWMALESLQTQKFTTKSDVWSFGVLLWELMTRGAPPYPDVNTFDITVYLLQGRRLLQPEYCPDPLYEVMLKCWHPKAEMRPSFSELVSRISAIFSTFIGEHYVHVNATYVNVKCVAPYPSLLSSEDNADDEVDTRPASFWETS

SEQ ID NO: 2101 - protein, 934 aa, Homo sapiens
MKAPAVLAPGILVLLFTLVQRSNGECKEALAKSEMNVNMKYQLPNFTAETPIQNVILHEHHIFLGATNYIYVLNEEDLQKVAEYKTGPVLEHPDCFPCQDCSSKANLSGGVWKDNINMALVVDTYYDDQLISCGSVNRGTCQRHVFPHNHTADIQSEVHCIFSPQIEEPSQCPDCVVSALGAKVLSSVKDRFINFFVGNTINSSYFPDHPLHSISVRRLKETKDGFMFLTDQSYIDVLPEFRDSYPIKYVHAFESNNFIYFLTVQRETLDAQTFHTRIIRFCSINSGLHSYMEMPLECILTEKRKKRSTKKEVFNILQAAYVSKPGAQLARQIGASLNDDILFGVFAQSKPDSAEPMDRSAMCAFPIKYVNDFFNKIVNKNNVRCLQHFYGPNHEHCFNRTLLRNSSGCEARRDEYRTEFTTALQRVDLFMGQFSEVLLTSISTFIKGDLTIANLGTSEGRFMQVVVSRSGPSTPHVNFLLDSHPVSPEVIVEHTLNQNGYTLVITGKKITKIPLNGLGCRHFQSCSQCLSAPPFVQCGWCHDKCVRSEECLSGTWTQQICLPAIYKVFPNSAPLEGGTRLTICGWDFGFRRNNKFDLKKTRVLLGNESCTLTLSESTMNTLKCTVGPAMNKHFNMSIIISNGHGTTQYSTFSYVDPVITSISPKYGPMAGGTLLTLTGNYLNSGNSRHISIGGKTCTLKSVSNSILECYTPAQTISTEFAVKLKIDLANRETSIFSYREDPIVYEIHPTKSFISGGSTITGVGKNLNSVSVPRMVINVHEAGRNFTVACQHRSNSEIICCTTPSLQQLNLQLPLKTKAFFMLDGILSKYFDLIYVHNPVFKPFEKPVMISMGNENVLEIKGNDIDPEAVKGEVLKVGNKSCENIHLHSEAVLCTVPNDLLKLNSELNIEVGFLHSSHDVNKEASVIMLFSGLK

SEQ ID NO: 2102 - protein, 281 aa, Homo sapiens
KEALAKSEMNVNMKYQLPNFTAETPIQNVILHEHHIFLGATNYIYVLNEEDLQKVAEYKTGPVLEHPDCFPCQDCSSKANLSGGVWKDNINMALVVDTYYDDQLISCGSVNRGTCQRHVFPHNHTADIQSEVHCIFSPQIEEPSQCPDCVVSALGAKVLSSVKDRFINFFVGNTINSSYFPDHPLHSISVRRLKETKDGFMFLTDQSYIDVLPEFRDSYPIKYVHAFESNNFIYFLTVQRETLDAQTFHTRIIRFCSINSGLHSYMEMPLECILTEKRKKR

SEQ ID NO: 2103 - protein, 1101 aa, Homo sapiens
STKKEVFNILQAAYVSKPGAQLARQIGASLNDDILFGVFAQSKPDSAEPMDRSAMCAFPIKYVNDFFNKIVNKNNVRCLQHFYGPNHEHCFNRTLLRNSSGCEARRDEYRTEFTTALQRVDLFMGQFSEVLLTSISTFIKGDLTIANLGTSEGRFMQVVVSRSGPSTPHVNFLLDSHPVSPEVIVEHTLNQNGYTLVITGKKITKIPLNGLGCRHFQSCSQCLSAPPFVQCGWCHDKCVRSEECLSGTWTQQICLPAIYKVFPNSAPLEGGTRLTICGWDFGFRRNNKFDLKKTRVLLGNESCTLTLSESTMNTLKCTVGPAMNKHFNMSIIISNGHGTTQYSTFSYVDPVITSISPKYGPMAGGTLLTLTGNYLNSGNSRHISIGGKTCTLKSVSNSILECYTPAQTISTEFAVKLKIDLANRETSIFSYREDPIVYEIHPTKSFISTWWKEPLNIVSFLFCFASGGSTITGVGKNLNSVSVPRMVINVHEAGRNFTVACQHRSNSEIICCTTPSLQQLNLQLPLKTKAFFMLDGILSKYFDLIYVHNPVFKPFEKPVMISMGNENVLEIKGNDIDPEAVKGEVLKVGNKSCENIHLHSEAVLCTVPNDLLKLNSELNIEWKQAISSTVLGKVIVQPDQNFTGLIAGVVSISTALLLLLGFFLWLKKRKQIKDLGSELVRYDARVHTPHLDRLVSARSVSPTTEMVSNESVDYRATFPEDQFPNSSQNGSCRQVQYPLTDMSPILTSGDSDISSPLLQNTVHIDLSALNPELVQAVQHVVIGPSSLIVHFNEVIGRGHFGCVYHGTLLDNDGKKIHCAVKSLNRITDIGEVSQFLTEGIIMKDFSHPNVLSLLGICLRSEGSPLVVLPYMKHGDLRNFIRNETHNPTVKDLIGFGLQVAKGMKYLASKKFVHRDLAARNCMLDEKFTVKVADFGLARDMYDKEYYSVHNKTGAKLPVKWMALESLQTQKFTTKSDVWSFGVLLWELMTRGAPPYPDVNTFDITVYLLQGRRLLQPEYCPDPLYEVMLKCWHPKAEMRPSFSELVSRISAIFSTFIGEHYVHVNATYVNVKCVAPYPSLLSSEDNADDEVDTRPASFWETS

SEQ ID NO: 2104 - protein, 1082 aa, Homo sapiens
TKKEVFNILQAAYVSKPGAQLARQIGASLNDDILFGVFAQSKPDSAEPMDRSAMCAFPIKYVNDFFNKIVNKNNVRCLQHFYGPNHEHCFNRTLLRNSSGCEARRDEYRTEFTTALQRVDLFMGQFSEVLLTSISTFIKGDLTIANLGTSEGRFMQVVVSRSGPSTPHVNFLLDSHPVSPEVIVEHTLNQNGYTLVITGKKITKIPLNGLGCRHFQSCSQCLSAPPFVQCGWCHDKCVRSEECLSGTWTQQICLPAIYKVFPNSAPLEGGTRLTICGWDFGFRRNNKFDLKKTRVLLGNESCTLTLSESTMNTLKCTVGPAMNKHFNMSIIISNGHGTTQYSTFSYVDPVITSISPKYGPMAGGTLLTLTGNYLNSGNSRHISIGGKTCTLKSVSNSILECYTPAQTISTEFAVKLKIDLANRETSIFSYREDPIVYEIHPTKSFISGGSTITGVGKNLNSVSVPRMVINVHEAGRNFTVACQHRSNSEIICCTTPSLQQLNLQLPLKTKAFFMLDGILSKYFDLIYVHNPVFKPFEKPVMISMGNENVLEIKGNDIDPEAVKGEVLKVGNKSCENIHLHSEAVLCTVPNDLLKLNSELNIEWKQAISSTVLGKVIVQPDQNFTGLIAGVVSISTALLLLLGFFLWLKKRKQIKDLGSELVRYDARVHTPHLDRLVSARSVSPTTEMVSNESVDYRATFPEDQFPNSSQNGSCRQVQYPLTDMSPILTSGDSDISSPLLQNTVHIDLSALNPELVQAVQHVVIGPSSLIVHFNEVIGRGHFGCVYHGTLLDNDGKKIHCAVKSLNRITDIGEVSQFLTEGIIMKDFSHPNVLSLLGICLRSEGSPLVVLPYMKHGDLRNFIRNETHNPTVKDLIGFGLQVAKGMKYLASKKFVHRDLAARNCMLDEKFTVKVADFGLARDMYDKEYYSVHNKTGAKLPVKWMALESLQTQKFTTKSDVWSFGVLLWELMTRGAPPYPDVNTFDITVYLLQGRRLLQPEYCPDPLYEVMLKCWHPKAEMRPSFSELVSRISAIFSTFIGEHYVHVNATYVNVKCVAPYPSLLSSEDNADDEVDTRPASFWETS

SEQ ID NO: 2105 - protein, 626 aa, Homo sapiens
TKKEVFNILQAAYVSKPGAQLARQIGASLNDDILFGVFAQSKPDSAEPMDRSAMCAFPIKYVNDFFNKIVNKNNVRCLQHFYGPNHEHCFNRTLLRNSSGCEARRDEYRTEFTTALQRVDLFMGQFSEVLLTSISTFIKGDLTIANLGTSEGRFMQVVVSRSGPSTPHVNFLLDSHPVSPEVIVEHTLNQNGYTLVITGKKITKIPLNGLGCRHFQSCSQCLSAPPFVQCGWCHDKCVRSEECLSGTWTQQICLPAIYKVFPNSAPLEGGTRLTICGWDFGFRRNNKFDLKKTRVLLGNESCTLTLSESTMNTLKCTVGPAMNKHFNMSIIISNGHGTTQYSTFSYVDPVITSISPKYGPMAGGTLLTLTGNYLNSGNSRHISIGGKTCTLKSVSNSILECYTPAQTISTEFAVKLKIDLANRETSIFSYREDPIVYEIHPTKSFISGGSTITGVGKNLNSVSVPRMVINVHEAGRNFTVACQHRSNSEIICCTTPSLQQLNLQLPLKTKAFFMLDGILSKYFDLIYVHNPVFKPFEKPVMISMGNENVLEIKGNDIDPEAVKGEVLKVGNKSCENIHLHSEAVLCTVPNDLLKLNSELNIEVGFLHSSHDVNKEASVIMLFSGLK

SEQ ID NO: 2106 - protein, 650 aa, synthetic construct
  REGION 1..650: note = Description of Artificial Sequence: Synthetic polypeptide
TKKEVFNILQAAYVSKPGAQLARQIGASLNDDILFGVFAQSKPDSAEPMDRSAMCAFPIKYVNDFFNKIVNKNNVRCLQHFYGPNHEHCFNRTLLRNSSGCEARRDEYRTEFTTALQRVDLFMGQFSEVLLTSISTFIKGDLTIANLGTSEGRFMQVVVSRSGPSTPHVNFLLDSHPVSPEVIVEHTLNQNGYTLVITGKKITKIPLNGLGCRHFQSCSQCLSAPPFVQCGWCHDKCVRSEECLSGTWTQQICLPAIYKVFPNSAPLEGGTRLTICGWDFGFRRNNKFDLKKTRVLLGNESCTLTLSESTMNTLKCTVGPAMNKHFNMSIIISNGHGTTQYSTFSYVDPVITSISPKYGPMAGGTLLTLTGNYLNSGNSRHISIGGKTCTLKSVSNSILECYTPAQTISTEFAVKLKIDLANRETSIFSYREDPIVYEIHPTKSFISTWWKEPLNIVSFLFCFASGGSTITGVGKNLNSVSVPRMVINVHEAGRNFTVACQHRSNSEIICCTTPSLQQLNLQLPLKTKAFFMLDGILSKYFDLIYVHNPVFKPFEKPVMISMGNENVLEIKGNDIDPEAVKGEVLKVGNKSCENIHLHSEAVLCTVPNDLLKLNSELNIEWKQAEQKLISEEDLEQKLISEEDLHHHHHH

SEQ ID NO: 2107 - protein, 838 aa, synthetic construct
  REGION 1..838: note = Description of Artificial Sequence: Synthetic polypeptide
TKKEVFNILQAAYVSKPGAQLARQIGASLNDDILFGVFAQSKPDSAEPMDRSAMCAFPIKYVNDFFNKIVNKNNVRCLQHFYGPNHEHCFNRTLLRNSSGCEARRDEYRTEFTTALQRVDLFMGQFSEVLLTSISTFIKGDLTIANLGTSEGRFMQVVVSRSGPSTPHVNFLLDSHPVSPEVIVEHTLNQNGYTLVITGKKITKIPLNGLGCRHFQSCSQCLSAPPFVQCGWCHDKCVRSEECLSGTWTQQICLPAIYKVFPNSAPLEGGTRLTICGWDFGFRRNNKFDLKKTRVLLGNESCTLTLSESTMNTLKCTVGPAMNKHFNMSIIISNGHGTTQYSTFSYVDPVITSISPKYGPMAGGTLLTLTGNYLNSGNSRHISIGGKTCTLKSVSNSILECYTPAQTISTEFAVKLKIDLANRETSIFSYREDPIVYEIHPTKSFISTWWKEPLNIVSFLFCFASGGSTITGVGKNLNSVSVPRMVINVHEAGRNFTVACQHRSNSEIICCTTPSLQQLNLQLPLKTKAFFMLDGILSKYFDLIYVHNPVFKPFEKPVMISMGNENVLEIKGNDIDPEAVKGEVLKVGNKSCENIHLHSEAVLCTVPNDLLKLNSELNIEWKQAMEVSSVFIFPPKPKDVLTITLTPKVTCVVVDISKDDPEVQFSWFVDDVEVHTAQTQPREEQFNSTFRSVSELPIMHQDWLNGKEFKCRVNSAAFPAPIEKTISKTKGRPKAPQVYTIPPPKEQMAKDKVSLTCMITDFFPEDITVEWQWNGQPAENYKNTQPIMDTDGSYFVYSKLNVQKSNWEAGNTFTCSVLHEGLHNHHTEKSLSHSPGKE

SEQ ID NO: 2108 - protein, 1100 aa, synthetic construct
  REGION 1..1100: note = Description of Artificial Sequence: Synthetic polypeptide
STKKEVFNILQAAYVSKPGAQLARQIGASLNDDILFGVFAQSKPDSAEPMDRSAMCAFPIKYVNDFFNKIVNKNNVRCLQHFYGPNHEHCFNRTLLRNSSGCEARRDEYRAEFTTALQRVDLFMGQFSEVLLTSISTFVKGDLTIANLGTSEGRFMQVVVSRSGPSTPHVNFLLDSHPVSPEVIVEHPLNQNGYTLVVTGKKITKIPLNGLGCRHFQSCSQCLSAPPFVQCGWCHDKCVRSEECPSGTWTQQICLPAIYKVFPTSAPLEGGTRLTICGWDFGFRRNNKFDLKKTRVLLGNESCTLTLSESTMNTLKCTVGPAMNKHFNMSIIISNGHGTTQYSTFSYVDPIITSISPKYGPMAGGTLLTLTGNYLNSGNSRHISIGGKTCTLKSVSNSILECYTPAQTISTEFAVKLKIDLANRETSIFSYREDPIVYEIHPTKSFISGGSTITGVGKNLHSVSVPRMVINVHEAGRNFTVACQHRSNSEIICCTTPSLQQLNLQLPLKTKAFFMLDGILSKYFDLIYVHNPVFKPFEKPVMISMGNENVLEIKGNDIDPEAVKGEVLKVGNKSCENIHLHSEAVLCTVPNDLLKLNSELNIEWKQAISSTVLGKVIVQPDQNFTGLIAGVVSISIALLLLLGLFLWLKKRKQIKDLGSELVRYDARVHTPHLDRLVSARSVSPTTEMVSNESVDYRATFPEDQFPNSSQNGSCRQVQYPLTDMSPILTSGDSDISSPLLQNTVHIDLSALNPELVQAVQHVVIGPSSLIVHFNEVIGRGHFGCVYHGTLLDNDGKKIHCAVKSLNRITDIGEVSQFLTEGIIMKDFSHPNVLSLLGICLRSEGSPLVVLPYMKHGDLRNFIRNETHNPTVKDLIGFGLQVAKGMKYLASKKFVHRDLAARNCMLDEKFTVKVADFGLARDMYDKEYYSVHNKTGAKLPVKWMALESLQTQKFTTKSDVWSFGVLLWELMTRGAPPYPDVNTFDITVYLLQGRRLLQPEYCPDPLYEVMLKCWHPKAEMRPSFSELVSRISAIFSTFIGEHYVHVNATYVNVKCVAPYPSLLSSEDNADDEVDTEQKLISEEDLEQKLISEEDLHHHHHH

SEQ ID NO: 2109 - protein, 936 aa, Homo sapiens
ECKEALAKSEMNVNMKYQLPNFTAETPIQNVILHEHHIFLGATNYIYVLNEEDLQKVAEYKTGPVLEHPDCFPCQDCSSKANLSGGVWKDNINMALVVDTYYDDQLISCGSVNRGTCQRHVFPHNHTADIQSEVHCIFSPQIEEPSQCPDCVVSALGAKVLSSVKDRFINFFVGNTINSSYFPDHPLHSISVRRLKETKDGFMFLTDQSYIDVLPEFRDSYPIKYVHAFESNNFIYFLTVQRETLDAQTFHTRIIRFCSINSGLHSYMEMPLECILTEKRKKRSTKKEVFNILQAAYVSKPGAQLARQIGASLNDDILFGVFAQSKPDSAEPMDRSAMCAFPIKYVNDFFNKIVNKNNVRCLQHFYGPNHEHCFNRTLLRNSSGCEARRDEYRTEFTTALQRVDLFMGQFSEVLLTSISTFIKGDLTIANLGTSEGRFMQVVVSRSGPSTPHVNFLLDSHPVSPEVIVEHTLNQNGYTLVITGKKITKIPLNGLGCRHFQSCSQCLSAPPFVQCGWCHDKCVRSEECLSGTWTQQICLPAIYKVFPNSAPLEGGTRLTICGWDFGFRRNNKFDLKKTRVLLGNESCTLTLSESTMNTLKCTVGPAMNKHFNMSIIISNGHGTTQYSTFSYVDPVITSISPKYGPMAGGTLLTLTGNYLNSGNSRHISIGGKTCTLKSVSNSILECYTPAQTISTEFAVKLKIDLANRETSIFSYREDPIVYEIHPTKSFISGGSTITGVGKNLNSVSVPRMVINVHEAGRNFTVACQHRSNSEIICCTTPSLQQLNLQLPLKTKAFFMLDGILSKYFDLIYVHNPVFKPFEKPVMISMGNENVLEIKGNDIDPEAVKGEVLKVGNKSCENIHLHSEAVLCTVPNDLLKLNSELNIEWKQAISSTVLGKVIVQPDQNFTEQKLISEEDLGGEQKLISEEDLHHHHHH

SEQ ID NO: 2110 - protein, 13 aa, Homo sapiens
VRRLKETKDGFMF

SEQ ID NO: 2111 - protein, 11 aa, Homo sapiens
LARQIGASLND

SEQ ID NO: 2112 - protein, 35 aa, Homo sapiens
FIKGDLTIANLGTSEGRFMQVVVSRSGPSTPHVNF

SEQ ID NO: 2113 - protein, 4 aa, synthetic construct
  REGION 1..4: note = Description of Artificial Sequence: Synthetic peptide
GGGG

SEQ ID NO: 2114 - protein, 4 aa, synthetic construct
  REGION 1..4: note = Description of Artificial Sequence: Synthetic peptide
GGFG

1.-107. (canceled)

108. A compound having a structure according to Formula (A):
BA-(NH-L1-B-(-L2-(-M-Dxd)ₘ)ₖ)ₙ (A), wherein:
L1 is absent or a first linker linked to said BA through side chain of a glutamine residue (Gln);
B is a branching unit comprising at least one adduct of group B′ and group B″, wherein one of the groups B′ and B″ is selected from —N₃ and [chemical structure]
and the other of the groups B′ and B″ is selected from [chemical structure]
where Q is CH or N;
L2 is a second linker covalently attached to the branching unit B via the at least one group B″;
M is a moiety having the structure [chemical structure]
where R, R′, and R″ are independently at each occurrence hydrogen or a C₁-C₄ alkyl, or wherein R′ and R″ together form a 5-membered or a 6-membered ring;
Dxd is an anti-tumor agent having a structure according to Formula (P): [chemical structure]
k is an integer from 1 to 12;
m is an integer from 1 to 30,
n is an integer from 1 to 30;
wherein BA is a bispecific antibody or an antigen-binding fragment thereof comprising: a first antigen binding domain (D1) and a second antigen binding domain (D2);
wherein D1 specifically binds a first epitope of human MET; and
wherein D2 specifically binds a second epitope of human MET.

109. The compound of claim 108, wherein D1 comprises three heavy chain complementarity determining regions (HCDR1, HCDR2 and HCDR3) within a heavy chain variable region (HCVR) comprising the amino acid sequence of SEQ ID NO: 2012 and three light chain complementarity determining regions (LCDR1, LCDR2 and LCDR3) within a light chain variable region (LCVR) comprising the amino acid sequence of SEQ ID NO: 2092; and
wherein D2 comprises three heavy chain complementarity determining regions (HCDR1, HCDR2 and HCDR3) within a heavy chain variable region (HCVR) comprising the amino acid sequence of SEQ ID NO: 2036 and three light chain complementarity determining regions (LCDR1, LCDR2 and LCDR3) within a light chain variable region (LCVR) comprising the amino acid sequence of SEQ ID NO: 2092.

110. The compound of claim 108, wherein L1 is absent; B is a branching unit comprising at least one adduct of group B′ and group B″, wherein one of the groups B′ and B″ is selected from —N₃ and [chemical structure]
and the other of the groups B′ and B″ is selected from [chemical structure]
where Q is CH or N;
L2 is a second linker comprising a self-immolative moiety and/or an enzyme labile moiety;
M is a moiety having the structure [chemical structure]
Dxd is an anti-tumor agent having a structure according to Formula (P): [chemical structure]
n is an integer from 1 to 10.

111. The compound of claim 108, wherein the glutamine residue Gln is naturally present in a CH₂ or CH₃ domain of the BA.

112. The compound of claim 111, wherein the Gln is Q295 or N297Q.

113. The compound of claim 110, wherein said compound has a structure of [chemical structure]
wherein n is an integer of one to eight.

114. A pharmaceutical composition comprising the compound of claim 108, and a pharmaceutically acceptable carrier.

115. A pharmaceutical composition comprising a compound having a structure of [chemical structure]
wherein n is an integer of one to eight; and wherein BA is a bispecific antibody or an antigen-binding fragment thereof comprising: a first antigen binding domain (D1) and a second antigen binding domain (D2);
wherein D1 specifically binds a first epitope of human MET; and
wherein D2 specifically binds a second epitope of human MET.

116. The pharmaceutical composition of claim 115, wherein the first antigen-binding domain D1 of the bispecific antigen-binding molecule comprising an HCDR1 comprising the amino acid sequence of SEQ ID NO:2014; HCDR2 comprising the amino acid sequence of SEQ ID NO:2016; HCDR3 comprising the amino acid sequence of SEQ ID NO:2018; LCDR1 comprising the amino acid sequence of SEQ ID NO:2094; LCDR2 comprising the amino acid sequence of SEQ ID NO:2096; and LCDR3 comprising the amino acid sequence of SEQ ID NO:2098; and
a second antigen-binding domain D2 of the bispecific antigen-binding molecule comprising an HCDR1 comprising the amino acid sequence of SEQ ID NO: 2038; an HCDR2 comprising the amino acid sequence of SEQ ID NO: 2040; an HCDR3 comprising the amino acid sequence of SEQ ID NO: 2042; an LCDR1 comprising the amino acid sequence of SEQ ID NO:2094; LCDR2 comprising the amino acid sequence of SEQ ID NO:2096; and LCDR3 comprising the amino acid sequence of SEQ ID NO:2098.

117. A method of treating a cancer in a subject suffering from a tumor associated with or mediated by MET expression or activity or the proliferation of MET+ cells comprising administering to the subject the compound of claim 108.

118. The method of claim 117, wherein the cancer is selected from the group consisting of lung cancer, prostate cancer, bladder cancer, cervical cancer, colon cancer, kidney cancer, breast cancer, pancreatic cancer, stomach cancer, uterine cancer, and ovarian cancer.

119. The method of claim 118, wherein the cancer is non-small cell lung cancer.

120. The method of claim 117 wherein n is an integer of one to eight wherein BA is a bispecific antibody or an antigen-binding fragment thereof comprising: a first antigen binding domain (D1) and a second antigen binding domain (D2);
wherein D1 specifically binds a first epitope of human MET; and
wherein D2 specifically binds a second epitope of human MET.

121. The method of claim 120, wherein the first antigen-binding domain D1 of the bispecific antigen-binding molecule comprising an HCDR1 comprising the amino acid sequence of SEQ ID NO:2014; HCDR2 comprising the amino acid sequence of SEQ ID NO:2016; HCDR3 comprising the amino acid sequence of SEQ ID NO:2018; LCDR1 comprising the amino acid sequence of SEQ ID NO:2094; LCDR2 comprising the amino acid sequence of SEQ ID NO:2096; and LCDR3 comprising the amino acid sequence of SEQ ID NO:2098; and
a second antigen-binding domain D2 of the bispecific antigen-binding molecule comprising an HCDR1 comprising the amino acid sequence of SEQ ID NO: 2038; an HCDR2 comprising the amino acid sequence of SEQ ID NO: 2040; an HCDR3 comprising the amino acid sequence of SEQ ID NO: 2042; an LCDR1 comprising the amino acid sequence of SEQ ID NO:2094; LCDR2 comprising the amino acid sequence of SEQ ID NO:2096; and LCDR3 comprising the amino acid sequence of SEQ ID NO:2098.

122. A method for preparing an antibody-drug conjugate having a formula of [chemical structure]
comprising the steps of
a). contacting a compound having a structure of [chemical structure]
(M2980) with a compound [chemical structure]
to afford an intermediate compound of [chemical structure]
and then
b). exposing of said intermediate with an BA in the presence of microbial transglutaminase to afford said antibody-drug conjugate.
wherein BA is a bispecific antibody or an antigen-binding fragment thereof comprising: a first antigen binding domain (D1) and a second antigen binding domain (D2);
wherein D1 specifically binds a first epitope of human MET; and
wherein D2 specifically binds a second epitope of human MET.

123. The method of claim 122, wherein D1 comprises three heavy chain complementarity determining regions (HCDR1, HCDR2 and HCDR3) within a heavy chain variable region (HCVR) comprising the amino acid sequence of SEQ ID NO: 2012 and three light chain complementarity determining regions (LCDR1, LCDR2 and LCDR3) within a light chain variable region (LCVR) comprising the amino acid sequence of SEQ ID NO: 2092; and
wherein D2 comprises three heavy chain complementarity determining regions (HCDR1, HCDR2 and HCDR3) within a heavy chain variable region (HCVR) comprising the amino acid sequence of SEQ ID NO: 2036 and three light chain complementarity determining regions (LCDR1, LCDR2 and LCDR3) within a light chain variable region (LCVR) comprising the amino acid sequence of SEQ ID NO: 2092.

124. A method for preparing an antibody-drug conjugate having a formula of [chemical structure]
comprising the steps of
a). exposing [chemical structure]
(M404) to an BA in the presence of microbial transglutaminase to afford an intermediate antibody with a handle having the structure of [chemical structure]
and
b). contacting said intermediate antibody with a handle with a compound having the structure of [chemical structure]
(M2980) to afford said antibody-drug conjugate; and wherein BA is a bispecific antibody or an antigen-binding fragment thereof comprising: a first antigen binding domain (D1) and a second antigen binding domain (D2);
wherein D1 specifically binds a first epitope of human MET; and
wherein D2 specifically binds a second epitope of human MET;

125. The method of claim 124, wherein D1 comprises three heavy chain complementarity determining regions (HCDR1, HCDR2 and HCDR3) within a heavy chain variable region (HCVR) comprising the amino acid sequence of SEQ ID NO: 2012 and three light chain complementarity determining regions (LCDR1, LCDR2 and LCDR3) within a light chain variable region (LCVR) comprising the amino acid sequence of SEQ ID NO: 2092; and
wherein D2 comprises three heavy chain complementarity determining regions (HCDR1, HCDR2 and HCDR3) within a heavy chain variable region (HCVR) comprising the amino acid sequence of SEQ ID NO: 2036 and three light chain complementarity determining regions (LCDR1, LCDR2 and LCDR3) within a light chain variable region (LCVR) comprising the amino acid sequence of SEQ ID NO: 2092.

126. A compound having a structure according to Formula [chemical structure]
wherein n is an integer of one to eight; BA is a bispecific antibody or an antigen-binding fragment thereof comprising: a first antigen binding domain (D1) and a second antigen binding domain (D2);
wherein D1 specifically binds a first epitope of human MET; and
wherein D2 specifically binds a second epitope of human MET;
wherein D1 comprises three heavy chain complementarity determining regions (HCDR1, HCDR2 and HCDR3) within a heavy chain variable region (HCVR) comprising the amino acid sequence of SEQ ID NO: 2012 and three light chain complementarity determining regions (LCDR1, LCDR2 and LCDR3) within a light chain variable region (LCVR) comprising the amino acid sequence of SEQ ID NO: 2092; and
wherein D2 comprises three heavy chain complementarity determining regions (HCDR1, HCDR2 and HCDR3) within a heavy chain variable region (HCVR) comprising the amino acid sequence of SEQ ID NO: 2036 and three light chain complementarity determining regions (LCDR1, LCDR2 and LCDR3) within a light chain variable region (LCVR) comprising the amino acid sequence of SEQ ID NO: 2092.

127. The compound of claim 126, wherein D1 comprises: an HCVR comprising the amino acid sequence of SEQ ID NO: 2012 or an amino acid sequence that is at least 95% identical thereto; and an LCVR comprising the amino acid sequence of SEQ ID NO: 2092 or an amino acid sequence that is at least 95% identical thereto.

128. The compound of claim 127, wherein D1 comprises: an HCVR comprising the amino acid sequence of SEQ ID NO: 2012; and an LCVR comprising the amino acid sequence of SEQ ID NO: 2092.

129. The compound of claim 126, wherein D2 comprises: an HCVR comprising the amino acid sequence of SEQ ID NO: 2036 or an amino acid sequence that is at least 95% identical thereto; and an LCVR comprising the amino acid sequence of SEQ ID NO: 2092 or an amino acid sequence that is at least 95% identical thereto.

130. The bispecific antigen-binding molecule of claim 129, wherein D2 comprises: an HCVR comprising the amino acid sequence of SEQ ID NO: 2036; and an LCVR comprising the amino acid sequence of SEQ ID NO: 20928.

131. A pharmaceutical composition comprising the compound of claim 126, and a pharmaceutically acceptable carrier.

132. A method of treating a cancer in a subject suffering from a tumor associated with or mediated by MET expression or activity or the proliferation of MET+ cells comprising administering to the subject the compound of claim 126.

133. The method of claim 132, wherein the cancer is selected from the group consisting of lung cancer, prostate cancer, bladder cancer, cervical cancer, colon cancer, kidney cancer, breast cancer, pancreatic cancer, stomach cancer, uterine cancer, and ovarian cancer.

134. The method of claim 133, wherein the cancer is non-small cell lung cancer.
